(19) United States
(12) Patent Application Publication
(10) Pub. No.: US 2025/0019717 A1
(43) Pub. Date: Jan. 16, 2025

(54) DURABLE DOWNY MILDEW RESISTANCE IN SPINACH

(71) Applicant: KWS VEGETABLES B.V., GELDERLAND (NL)

(72) Inventors: JOHANNES SIMON GROENENDIJK, WAGENINGEN (NL); JAN DE VISSER, ANDIJK (NL); JOHANNES MARINUS RIJK, ENS (NL)

(21) Appl. No.: 18/294,306

(22) PCT Filed: Aug. 5, 2022
(86) PCT No.: PCT/EP2022/072119

§ 371 Date: Feb. 1, 2024

(30) Foreign Application Priority Data
Aug. 6, 2021 (EP) 21190145.9

(51) Int. Cl. C12N 15/82

(52) U.S. Cl. CPC C12N 15/8282

(57) ABSTRACT

The present disclosure relates to methods of identifying and selecting plants with resistance to downy mildew and further plant pathogens. Provided are methods to identify a novel gene that encode proteins associated with plant resistance to downy mildew and further plant pathogens, and uses thereof. This disease resistant gene is useful in the production of resistant plants through breeding, transgenic modification, or genome editing.

### SEQUENCE LISTING

[0001] The instant application contains a sequence listing that has been submitted in XML format by electronic submission and is hereby incorporated by reference in its entirety. Said XML copy, created on Sep. 3, 2024, is named “P14647US00_SequenceListing.xml” and is 1,110,283 bytes in size.

### TECHNICAL FIELD

[0002] The present disclosure relates to the field of plant breeding and molecular biology and more specifically to novel genes providing resistance to downy mildew and uses thereof.

### BACKGROUND

[0003] Spinach (Spinacia oleracea) is a flowering plant from the Amaranthaceae family that is grown as a vegetable. The consumable parts of spinach are the leaves from the vegetative stage. Spinach is sold loose, bunched, in prepacked bags, canned, or frozen. There are three basic types of spinach, namely the savoy, semi-savoy and smooth types. Savoy has crinkly and curly leaves. Flat or smooth leaf spinach has in general broad, smooth leaves. Semi-savoy is a variety with slightly crinkled leaves. The main market for spinach is baby-leaf. Baby spinach leaves are usually of the flat-leaf variety and usually the harvested leaves are not longer than about eight centimeters. These tender, sweet leaves are sold loose rather than in bunch. They are often used in salads, but can also be lightly cooked. Downy mildew, which in spinach is caused by the pathogen Peronospora effusa (also known as P. farinosa f. sp. spinaciae), is a major threat for spinach growers, because it affects the harvested plant parts, namely the leaves. Infection makes the leaves unsuitable for sale and consumption, as it manifests itself phenotypically as yellow lesions on the older leaves, and on the abaxial leaf surface a greyish fungal growth can be observed. The infection can spread very rapidly, and it can occur both in glasshouse cultivation, in vertical farming, and in soil cultivation. The optimal temperature for formation and germination of P. effusa is 9 to 12° C., and it is facilitated by a high relative humidity. When pathogens are deposited on a humid leaf surface they can readily germinate and infect the leaf. Pathogen growth is optimal between 8 and 20° C. and a relative humidity of ≥80%, and growth can be observed within 6 and 13 days after infection. P. effusa can survive in the soil for up to 3 years, or in seeds or living plants. Various plants or germplasms having at least partial resistance to downy mildew caused by P. effusa are known, for instance from Monsanto Vegetable IP Management (Spinacia Oleracea L., Kona-Swb2636 and Smbs151262-Smb-S015-1262m), from She Hongbing et al., 2018 (Fine mapping and candidate gene screening of the downy mildew resistance geneRPF1 in Spinach), and WO 2013/064436. Methods for modulating plant growth and phenotype are known in the art, for example from US 2017/037422. In addition, various spinach genes are known, as can be retrieved from the NCBI database. In recent years various resistance genes have been identified that provide spinach plants with a resistance against downy mildew. However, it has been observed that previously resistant spinach cultivars can again become susceptible to the pathogen. Investigations revealed that the cultivars themselves had not changed, and that the loss of downy mildew resistance must therefore be due to P. effusa overcoming the resistance in these spinach cultivars. The downy mildew races that were able to infect resistant spinach cultivars have been identified on a differential reference set, used to test spinach cultivars for resistance. The differential set comprises a series of spinach cultivars (hybrids) that have different resistance patterns to the currently identified pathogenic races. To date, 19 pathogenic races of spinach downy mildew (Pe) have been officially identified and characterized. Races 4 through 10 were identified between 1990 and 2009, which illustrates the versatility and adaptability of the pathogen to overcome resistances in spinach. In 2014, isolate UA1014APLP (also known as UA1014 and now Pe:17) was identified by the Correll lab of the University of Arkansas. The International Working Group Peronospora in Spinach (IWGP) has named two new races of P. effusa in spinach: Pe:18 and Pe:19. Both races pose a major threat to the spinach industry.

[0004] In different geographical regions different combinations of pathogenic races or isolates occur, and the spinach industry therefore has a strong demand for spinach cultivars that are resistant to as many relevant downy mildew races as possible, preferably to all races that may occur in their region, and even to the newest threats that cannot be countered with the resistances that are present in the commercially available spinach cultivars.

[0005] It is crucial to stay at the forefront of developments in this field, as Peronospora continuously develops the ability to break the resistances that are present in commercial spinach varieties. For this reason new resistance genes are very valuable assets, and they form an important research focus in spinach breeding. Due to the threat of not finding new R-genes to a newly developed race of the pathogen, there is also a need to find alternative resistances that are broad-spectrum (most/all races) and more durable.

[0006] The goal of spinach breeders is to rapidly develop spinach varieties with resistance to as many Peronospora races as possible, including the latest identified. To date, 19 Pe races are officially recognized and made publicly available from the Department of Plant Pathology, University of Arkansas, Fayetteville, AR 72701, USA, and also from NAK Tuinbouw, Sotaweg 22, 2371 GD Roelofarendsveen, the Netherlands. Recently, Pe. 20 has been identified in certain regions, and additional races of Peronospora effusa are expected to develop continuously.

### SUMMARY

[0007] Compositions and methods useful in identifying and selecting plant disease susceptibility genes, or “S-genes,” are provided herein. The compositions and methods are useful in generating resistant plants by chemical mutagenesis, selecting disease resistant plants, creating transgenic resistant plants, and/or creating resistant genome edited plants. Plants having newly conferred or enhanced resistance to various plant diseases as compared to control plants are also provided herein. In some embodiments, the compositions and methods are useful in generating resistant plants by chemical mutagenesis, selecting downy mildew (DM) disease resistant spinach plants, creating transgenic DM resistant spinach plants, and/or creating DM resistant genome edited spinach plants.

[0008] A DM resistant spinach plant may be crossed to a second spinach plant in order to obtain a progeny spinach plant that has the resistant gene allele. The disease resistance may be newly conferred or enhanced relative to a control plant that does not have the favorable allele. The DM resistant gene allele may be further refined to a chromosomal interval defined by and including defined markers. In some embodiments, the methods for identifying and/or selecting plants having resistance to DM are presented. In these methods, DNA of a spinach plant is analyzed for the presence of a resistant gene allele on chromosome 4 that is associated with DM resistance, wherein said resistant gene allele comprises a “T” at Spov3_chr4_93275081 (position 101 of reference sequence SEQ ID NO: 241), an “A” at Spov3_chr4_105049870 (position 101 of reference sequence SEQ ID NO: 242), an “A” at Spov3_chr4_107241402 (position 101 of reference sequence SEQ ID NO: 243), an “A” at Spov3_chr4_109546568 (position 101 of reference sequence SEQ ID NO: 244), an “A” at Spov3_chr4_109698808 (position 101 of reference sequence SEQ ID NO: 245), an “A” at Spov3_chr4_112008390 (position 101 of reference sequence SEQ ID NO: 246), a “T” at Spov3_chr4_112574123 (position 101 of reference sequence SEQ ID NO: 247), a “T” at Spov3_chr4_117783935 (position 101 of reference sequence SEQ ID NO: 248), an “A” at Spov3_chr4_118191085 (position 101 of reference sequence SEQ ID NO: 249), an “A” at Spov3_chr4_118788268 (position 101 of reference sequence SEQ ID NO: 250), or an “A” at Spov3_chr4_121142541 (position 101 of reference sequence SEQ ID NO: 251), and a plant is identified and/or selected as having DM resistance if said resistant gene allele is detected.

[0009] In some embodiments, the methods for identifying and/or selecting plants having resistance to DM comprise detecting or selecting a genomic region comprising SEQ ID NO: 1, SEQ ID NO: 93, or SEQ ID NO: 169. The DM resistance may be newly conferred or enhanced relative to a control plant that does not have the favorable allele. In an embodiment, the DM resistant region comprises a gene encoding a clathrin adaptor medium subunit protein that confers or enhances resistance to DM. In some embodiments, the clathrin adaptor medium subunit protein comprises the amino acid sequence as set forth in SEQ ID NO: 3. In an embodiment, the DM resistant region comprises a gene encoding a pentatricopeptide repeat-containing protein that confers or enhances resistance to DM. In some embodiments, the pentatricopeptide repeat-containing protein comprises the amino acid sequence as set forth in SEQ ID NO: 95. In an embodiment, the DM resistant region comprises a gene encoding an RPS2-like resistance protein that confers or enhances resistance to DM. In some embodiments, the RPS2-like resistance protein comprises the amino acid sequence as set forth in SEQ ID NO: 171.

[0010] In another embodiment, methods of identifying and/or selecting plants with DM resistance are provided in which one or more marker alleles linked to and associated with any of: a “T” at Spov3_chr4_93275081 (position 101 of reference sequence SEQ ID NO: 241), an “A” at Spov3_chr4_105049870 (position 101 of reference sequence SEQ ID NO: 242), an “A” at Spov3_chr4_107241402 (position 101 of reference sequence SEQ ID NO: 243), an “A” at Spov3_chr4_109546568 (position 101 of reference sequence SEQ ID NO: 244), an “A” at Spov3_chr4_109698808 (position 101 of reference sequence SEQ ID NO: 245), an “A” at Spov3_chr4_112008390 (position 101 of reference sequence SEQ ID NO: 246), a “T” at Spov3_chr4_112574123 (position 101 of reference sequence SEQ ID NO: 247), a “T” at Spov3_chr4_117783935 (position 101 of reference sequence SEQ ID NO: 248), an “A” at Spov3_chr4_118191085 (position 101 of reference sequence SEQ ID NO: 249), an “A” at Spov3_chr4_118788268 (position 101 of reference sequence SEQ ID NO: 250), or an “A” at Spov3_chr4_121142541 (position 101 of reference sequence SEQ ID NO: 251), are detected in a plant, and a plant having the one or more marker alleles is selected. The one or more marker alleles may be linked by 10 cM, 9 CM, 8 CM, 7 CM, 6 CM, 5 CM, 4 CM, 3 CM, 2 cM, 1 CM, 0.9 CM, 0.8 CM, 0.7 CM, 0.6 CM, 0.5 CM, 0.4 CM, 0.3 cM, 0.2 cM, or 0.1 cM or less on a single meiosis based genetic map. The selected plant may be crossed to a second plant to obtain a progeny plant that has one or more marker alleles linked to and associated with any of a “T” at Spov3_chr4_93275081 (position 101 of reference sequence SEQ ID NO: 241), an “A” at Spov3_chr4_105049870 (position 101 of reference sequence SEQ ID NO: 242), an “A” at Spov3_chr4_107241402 (position 101 of reference sequence SEQ ID NO: 243), an “A” at Spov3_chr4_109546568 (position 101 of reference sequence SEQ ID NO: 244), an “A” at Spov3_chr4_109698808 (position 101 of reference sequence SEQ ID NO: 245), an “A” at Spov3_chr4_112008390 (position 101 of reference sequence SEQ ID NO: 246), a “T” at Spov3_chr4_112574123 (position 101 of reference sequence SEQ ID NO: 247), a “T” at Spov3_chr4_117783935 (position 101 of reference sequence SEQ ID NO: 248), an “A” at Spov3_chr4_118191085 (position 101 of reference sequence SEQ ID NO: 249), an “A” at Spov3_chr4_118788268 (position 15 101 of reference sequence SEQ ID NO: 250), or an “A” at Spov3_chr4_121142541 (position 101 of reference sequence SEQ ID NO: 251).

[0011] In another embodiment, methods of introgressing a gene allele associated with DM resistance are presented herein. In these methods, a population of plants is screened with one or more markers to determine if any of the plants has a gene allele associated with DM resistance, and at least one plant that has the gene allele associated with DM resistance is selected from the population. The gene allele comprises a “T” at Spov3_chr4_93275081 (position 101 of reference sequence SEQ ID NO: 241), an “A” at Spov3_chr4_105049870 (position 101 of reference sequence SEQ ID NO: 242), an “A” at Spov3_chr4_107241402 (position 101 of reference sequence SEQ ID NO: 243), an “A” at Spov3_chr4_109546568 (position 101 of reference sequence SEQ ID NO: 244), an “A” at Spov3_chr4_109698808 (position 101 of reference sequence SEQ ID NO: 245), an “A” at Spov3_chr4_112008390 (position 101 of reference sequence SEQ ID NO: 246), a “T” at Spov3_chr4_112574123 (position 101 of reference sequence SEQ ID NO: 247), a “T” at Spov3_chr4_117783935 (position 101 of reference sequence SEQ ID NO: 248), an “A” at Spov3_chr4_118191085 (position 101 of reference sequence SEQ ID NO: 249), an “A” at Spov3_chr4_118788268 (position 101 of reference sequence SEQ ID NO: 250), or an “A” at Spov3_chr4_121142541 (position 101 of reference sequence SEQ ID NO: 251).

[0012] In some embodiments, introduction of DM resistant genes from resistant to susceptible lines may be achieved either by marker-assisted trait introgression, transgenic, or genome editing (including gene replacement or allele replacement) approaches.

[0013] The methods embodied by the present disclosure relate to a method for transforming a host cell, including a plant cell, comprising transforming the host cell with the polynucleotide of an embodiment of the present disclosure; a method for producing a plant comprising transforming a plant cell with the recombinant DNA construct of an embodiment of the present disclosure and regenerating a plant from the transformed plant cell, and methods of conferring or enhancing disease resistance, comprising transforming a plant with the recombinant DNA construct disclosed herein.

[0014] In one embodiment a method of altering the level of expression of a protein capable of conferring disease resistance in a plant or plant cell is provided wherein the method comprises transforming a plant cell with a recombinant DNA construct disclosed herein and growing the transformed plant cell under conditions that are suitable for expression of the recombinant DNA construct wherein expression of the recombinant DNA construct results in production of altered levels of a protein capable of conferring disease resistance in the transformed host.

[0015] Provided herein is a method of modifying plant disease resistance, the method comprising introducing one or more nucleotide modifications through a targeted DNA break at a genomic locus of a plant, wherein the genomic locus comprises an S-gene involved in disease resistance encoding a clathrin adaptor medium subunit protein, a pentatricopeptide repeat-containing family protein, or an RPS2-like resistance protein, and wherein the plant disease resistance is modified compared to a control plant not comprising the one or more introduced genetic modifications. In certain embodiments, the S-gene comprise a polynucleotide that is at least 80%, at least 85%, at least 90%, at least 95%, at least 96%, at least 97%, at least 98%, or at least 99% identical to a sequence selected from SEQ ID NOs: 4, 7-34, 96, 99-121, 172, 175-196, 252-270, 316-320, and 331 or encodes a polypeptide comprising an amino acid sequence that is at least 80%, at least 85%, at least 90%, at least 95%, at least 96%, at least 97%, at least 98%, or at least 99% identical to a sequence selected from SEQ ID NOs: 6, 64-92, 98, 145-168, 174, 219-240, 294-315, 326-330, and 333. In certain embodiments, the targeted DNA modification targets more than one distinct genomic loci that is involved in disease resistance of the plant.

[0016] In certain embodiments, the targeted DNA modification is selected from the group consisting of insertion, deletion, single nucleotide polymorphism (SNP), and a polynucleotide modification, such that the expression of the polypeptide encoded by the S-gene is altered (increased or reduced). In certain embodiments, the targeted DNA modification results in one or more of the following: altered (increased or reduced) expression of the S-gene; generation of one or more alternative spliced transcripts of the S-gene; alteration such as deletion of one or more DNA binding domains; frameshift mutation in one or more exons of the S-gene; alteration such as deletion of a substantial portion of the S-gene or deletion of the full-length open reading frame of the S-gene; induction or repression of an enhancer motif present within a regulatory region encoding the S-gene; modification of one or more nucleotides or alteration such as deletion of a regulatory element operably linked to the expression of the S-gene, wherein the regulatory element is present within a promoter, intron, 3′UTR, terminator or a combination thereof. In certain embodiments, the targeted DNA modification targets the genomic locus of the S-gene such that the one or more nucleotide modifications are present within (a) the same coding region; (b) non-coding region; (c) regulatory sequence; (d) untranslated region, or (e) any combination of (a)-(d) of an endogenous polynucleotide encoding a polypeptide that is involved in disease resistance and critically facilitates compatibility.

[0017] In certain embodiments, the targeted DNA modification is introduced by an RNA-guided endonuclease, a site-specific deaminase, or a site-specific endonuclease. In certain embodiments, the targeted DNA modification is through a genome modification technique selected from the group consisting of polynucleotide-guided endonuclease, CRISPR-Cas endonucleases, base editing deaminases, zinc finger nuclease, a transcription activator-like effector nuclease (TALEN), engineered site-specific meganucleases, or Argonaute. In certain embodiments, the targeted DNA modification is induced by using a guide RNA that corresponds to a target sequence comprising a polynucleotide that is at least 80%, at least 85%, at least 90%, at least 95%, at least 96%, at least 97%, at least 98%, or at least 99% identical to a sequence selected from SEQ ID NOs: 4, 7-34, 96, 99-121, 172, 175-196, 252-270, 316-320, and 331 or a polynucleotide that encodes a polypeptide comprising an amino acid sequence that is at least 80%, at least 85%, at least 90%, at least 95%, at least 96%, at least 97%, at least 98%, or at least 99% identical to a sequence selected from SEQ ID NOs: 6, 64-92, 98, 145-168, 174, 219-240, 294-315, 326-330, and 333. In certain embodiments, the plant exhibits increased disease resistance when the targeted DNA modification results in altered expression or activity of the protein encoded by the S-gene. In certain embodiments, the plant is a spinach plant. In certain embodiments, the disease is downy mildew.

[0018] Also provided herein is a plant exhibiting increased disease resistance comprising a modified genomic locus comprising an S-gene involved in disease resistance, wherein the genomic locus comprises one or more introduced mutations compared to a control plant and wherein the genomic locus comprises a polynucleotide that is at least 80%, at least 85%, at least 90%, at least 95%, at least 96%, at least 97%, at least 98%, or at least 99% identical to a sequence selected from SEQ ID NOs: 4, 7-34, 96, 99-121, 172, 175-196, 252-270, 316-320, and 331 or encodes a polypeptide that is at least 80%, at least 85%, at least 90%, at least 95%, at least 96%, at least 97%, at least 98%, or at least 99% identical to the amino acid sequence selected from SEQ ID NOs: 6, 64-92, 98, 145-168, 174, 219-240, 294-315, 326-330, and 333.

[0019] Also provided herein is a recombinant DNA construct comprising a polynucleotide sequence that is at least 80%, at least 85%, at least 90%, at least 95%, at least 96%, at least 97%, at least 98%, or at least 99% identical to a sequence selected from SEQ ID NOs: 4, 7-34, 96, 99-121, 172, 175-196, 252-270, 316-320, and 331 or a polynucleotide encoding an amino acid sequence that is at least 80%, at least 85%, at least 90%, at least 95%, at least 96%, at least 97%, at least 98%, or at least 99% identical to an amino acid sequence selected from SEQ ID NOs: 6, 64-92, 98, 145-168, 174, 219-240, 294-315, 326-330, and 333, operably linked to at least one heterologous nucleic acid sequence.

[0020] Additionally, provided herein is a plant cell comprising a recombinant DNA construct comprising a polynucleotide sequence that is at least 80%, at least 85%, at least 90%, at least 95%, at least 96%, at least 97%, at least 98%, or at least 99% identical to a sequence selected from SEQ ID NOs 4, 7-34, 96, 99-121, 172, 175-196, 252-270, 316-320, and 331 or a polynucleotide encoding an amino acid sequence that is at least 80%, at least 85%, at least 90%, at least 95%, at least 96%, at least 97%, at least 98%, or at least 99% identical to an amino acid sequence selected from SEQ ID NOs: 6, 64-92, 98, 145-168, 174, 219-240, 294-315, 326-330, and 333, operably linked to at least one heterologous nucleic acid sequence.

[0021] Provided herein is a guide RNA sequence that targets a genomic locus of a plant cell, wherein the genomic locus comprises a polynucleotide that is at least 80%, at least 85%, at least 90%, at least 95%, at least 96%, at least 97%, at least 98%, or at least 99% identical to a sequence selected from SEQ ID NOs: 4, 7-34, 96, 99-121, 172, 175-196, 252-270, 316-320, and 331 or a polynucleotide that encodes a polypeptide comprising an amino acid sequence that is at least 80%, at least 85%, at least 90%, at least 95%, at least 96%, at least 97%, at least 98%, or at least 99% identical to a sequence selected from SEQ ID NOs: 6, 64-92, 98, 145-168, 174, 219-240, 294-315, 326-330, and 333. In certain embodiments, the guide RNA is present in a recombinant DNA construct.

[0022] While multiple embodiments are disclosed, still other embodiments of the inventions will become apparent to those skilled in the art from the following detailed description, which shows and describes illustrative embodiments of the invention. Accordingly, the figures and detailed description are to be regarded as illustrative in nature and not restrictive.

### BRIEF DESCRIPTION OF THE FIGURES

[0023] FIG. 1 shows SNP alleles informative for EMS transitions as a percentage of the EMS alleles in the total read coverage. Drawn are the percentages (Y-axis: % R and % S) at their positions on Chr4 in Phytozome: Soleracea_575_Spov3 mentioned in Examples (X-axis: 0-122 Mb).

[0024] FIG. 2 shows GWAS analysis of 91 EMS-induced SNPs and susceptibility/resistance scores to Pe:16. Shown is a Manhattan plot of significant scores of SNPs and their positions on spinach Chr1 to Chr6 in Phytozome: Soleracea_575_Spov3 mentioned in Examples. There is a highly significant correlation of 11 SNPs at the distal end of Chr4.

[0025] FIG. 3 shows a GWAS analysis of B11-509 specific SNPs and susceptibility/resistance scores to Pe:16. Shown is a Manhattan plot of significant scores of SNPs in the region 112-118 Mb of Chr4. There is a clear correlation of 3 SNPs in 0.62 Mb region surrounding Spov3_chr4.04649 (RPS2-Like).

[0026] FIG. 4 shows a sequence Alignment of reassembled contig_59494 mutant B11-509 EMS22-20 and Gene Model SOV1g044450_coding_sequence of a new Viroflay high quality assembly. Identical residues are shown as ‘*’, whereas different residues are shown as a space: intron1 (13-290 bp), G>A (296), G>C (1751), −/T (1755), deletion (1756-1946), −/G (1947) and G>A (2120). T>C (1177) and T>A (12007) are synonymous mutations.

[0027] FIG. 5 shows a sequence Alignment of wild type Viroflay Gene Model SOV19044450_protein and the translated ortholog sequence of mutant B11-509 EMS22-20. Identical residues are shown as ‘*’, whereas different residues are shown as a space: K490N, L493C and G614R.

[0028] FIG. 6 shows a differential expression analysis of Soleracea_575_Spov3 Gene Model Chr4.04649 (RPS2-like). Shown are relative expression levels for wild type B11-509 and mutant EMS22-20 at 4 time points in untreated (M, Mock) and Pe:16 infected (I) samples. The expression is upregulated in mutant plants compared to the wild-type B11-509 plants at all time points in the mock-treatment (uninfected plants) and at three time points in Pe:16-infected plants, indicating an overall increased gene expression of RPS2-like gene in the EMS22-20 plants, irrespective of the received treatment (mock or Pe:16).

[0029] FIG. 7 shows the infection process of DM isolate Pe:16 on leaves of both B11-509 and EMS22-20 using Trypan Blue staining and microscopical analysis. Shown is that the infection process in B11-509, i.e. penetration of the leaves by the appressoria, and hyphae growth is clearly visible. In addition, it is believed that haustoria are formed in B11-509. In contrast, penetration of hyphae is not visible in mutant EMS22-20.

[0030] FIG. 8 shows a microscopical analysis of the infection process of DM isolate Pe:16 in mutant EMS22-20, at day 4 and day 6 (lower right). Shown is that spores and hyphae cluster together on the leaf surface and are often washed off from the leaf.

### DETAILED DESCRIPTION

[0031] So that the present invention may be more readily understood, certain terms are first defined. Unless defined otherwise, all technical and scientific terms used herein have the same meaning as commonly understood by one of ordinary skill in the art to which embodiments of the invention pertain. Many methods and materials similar, modified, or equivalent to those described herein can be used in the practice of the embodiments of the present invention without undue experimentation, the preferred materials and methods are described herein. In describing and claiming the embodiments of the present invention, the following terminology will be used in accordance with the definitions set out below.

[0032] It is to be understood that all terminology used herein is for the purpose of describing particular embodiments only, and is not intended to be limiting in any manner or scope. For example, as used in this specification and the appended claims, the singular forms “a,” “an” and “the” can include plural referents unless the content clearly indicates otherwise. Similarly, the word “or” is intended to include “and” unless the context clearly indicate otherwise. The word “or” means any one member of a particular list and also includes any combination of members of that list. Further, all units, prefixes, and symbols may be denoted in its SI accepted form.

[0033] Numeric ranges recited within the specification are inclusive of the numbers defining the range and include each integer within the defined range. Throughout this disclosure, various aspects of this invention are presented in a range format. It should be understood that the description in range format is merely for convenience and brevity and should not be construed as an inflexible limitation on the scope of the invention. Accordingly, the description of a range should be considered to have specifically disclosed all the possible sub-ranges, fractions, and individual numerical values within that range. For example, description of a range such as from 1 to 6 should be considered to have specifically disclosed sub-ranges such as from 1 to 3, from 1 to 4, from 1 to 5, from 2 to 4, from 2 to 6, from 3 to 6 etc., as well as individual numbers within that range, for example, 1, 2, 3, 4, 5, and 6, and decimals and fractions, for example, 1.2, 3.8, 1½, and 4¾. This applies regardless of the breadth of the range.

[0034] The term “about,” as used herein, refers to variation in the numerical quantity that can occur, for example, through typical measuring techniques and equipment, with respect to any quantifiable variable, including, but not limited to, mass, volume, time, and temperature. Further, given solid and liquid handling procedures used in the real world, there is certain inadvertent error and variation that is likely through differences in the manufacture, source, or purity of the ingredients used to make the compositions or carry out the methods and the like. The term “about” also encompasses these variations. Whether or not modified by the term “about,” the claims include equivalents to the quantities.

[0035] An allele is “associated with” a trait when it is part of or linked to a DNA sequence, or is an allele that affects the expression of the trait. The presence of the allele is an indicator of how the trait will be expressed.

[0036] As used herein, the term “chromosomal interval” designates a contiguous linear span of genomic DNA that resides in planta on a single chromosome. The genetic elements or genes located on a single chromosomal interval are physically linked. The size of a chromosomal interval is not particularly limited. In some aspects, the genetic elements located within a single chromosomal interval are genetically linked, typically with a genetic recombination distance of, for example, less than or equal to 20 cM, or alternatively, less than or equal to 10 cM. That is, two genetic elements within a single chromosomal interval undergo recombination at a frequency of less than or equal to 20% or 10%.

[0037] The phrase “closely linked”, in the present application, means that recombination between two linked loci occurs with a frequency of equal to or less than about 10% (i.e., are separated on a genetic map by not more than 10 cM). Put another way, the closely linked loci co-segregate at least 90% of the time. Marker loci are especially useful with respect to the subject matter of the current disclosure when they demonstrate a significant probability of co segregation (linkage) with a desired trait (e.g., resistance to southern corn rust). Closely linked loci such as a marker locus and a second locus can display an inter-locus recombination frequency of 10% or less, preferably about 9% or less, still more preferably about 8% or less, yet more preferably about 7% or less, still more preferably about 6% or less, yet more preferably about 5% or less, still more preferably about 4% or less, yet more preferably about 3% or less, and still more preferably about 2% or less. In highly preferred embodiments, the relevant loci display a recombination a frequency of about 1% or less, e.g., about 0.75% or less, more preferably about 0.5% or less, or yet more preferably about 0.25% or less. Two loci that are localized to the same chromosome, and at such a distance that recombination between the two loci occurs at a frequency of less than 10% (e.g., about 9%, 8%, 7%, 6%, 5%, 4%, 3%, 2%, 1%, 0.75%, 0.5%, 0.25%, or less) are also said to be “proximal to” each other. In some cases, two different markers can have the same genetic map coordinates. In that case, the two markers are in such close proximity to each other that recombination occurs between them with such low frequency that it is undetectable.

[0038] The term “crossed” or “cross” refers to a sexual cross and involved the fusion of two haploid gametes via pollination to produce diploid progeny (e.g., cells, seeds or plants). The term encompasses both the pollination of one plant by another and selfing (or self-pollination, e.g., when the pollen and ovule are from the same plant).

[0039] As used to herein, “disease resistant” or “have resistance to a disease” refers to a plant showing increase resistance to a disease compared to a control plant. Disease resistance may manifest in fewer and/or smaller lesions, increased plant health, increased yield, increased root mass, increased plant vigor, less or no discoloration, increased growth, reduced necrotic area, or reduced wilting. In some embodiments, an allele may show resistance to one or more diseases.

[0040] Diseases affecting spinach plants include, but are not limited to, anthracnose (Colletotrichum dematium f. sp. spinaciae), damping off/seedling blight (Pythium ultimum), downy mildew (Peronospora effusa), fusarium wilt (Fusarium oxysporum f. sp. spinaciae), Stemphylium leaf spot (Stemphylium versicarium, Stemphylium beticola, Stemphylium drummondii), verticillium wilt (Verticillium dahlia), white rust (Albugo occidentalis), black root rot (Aphanomyces cochlioides), and Cladosporium leaf spot (Cladosporium variabile). Pathogens causing said diseases are thus widespread over various phyla. For example, Peronospora species are part of the phylum Oomycota, while Colletotrichum species are part of the phylum Ascomyceta.

[0041] Diseases affecting basil plants include, but are not limited to, downy mildew (Peronospora belbahrii).

[0042] Diseases affecting common bean plants include, but are not limited to, anthracnose (Colletotrichum lindemuthianum), pythium root rot (Pythium ultimum), and white mold (Sclerotinia sclerotiorum).

[0043] Diseases affecting beet plants include, but are not limited to, black wood vessel (Pythium irregulare), damping off/black root/seedling blight (Pythium ultimum), downy mildew (Peronospora schachtii), and phytophthora wet rot (Phytophthora drechsleri).

[0044] Diseases affecting carrot plants include, but are not limited to, cavity spot (Pythium ssp.), lateral root dieback (Pythium ssp.), leaf blight (Alternaria dauci), powdery mildew (Erysiphe heraclei), and white mold (Sclerotinia sclerotiorum).

[0045] Diseases affecting plants in the family Cucurbitaceae (e.g., cucumber, melon, watermelon, squash, pumpkin, gourd, and others crops) include, but are not limited to, alternaria leaf spot (Alternaria cucumerina), anthracnose (Colletotrichum obiculare), downy mildew (Pseudoperonospora cubensis), gummy stem blight (Didymella bryoniae), and powdery mildew (Erysiphe cichoracearum, Sphaerotheca fuliginea).

[0046] Diseases affecting grape plants include, but are not limited to, downy mildew (Plasmopara viticola).

[0047] Diseases affecting hop plants include, but are not limited to, downy mildew (Pseudoperonospora humuli).

[0048] Diseases affecting lettuce plants include, but are not limited to, downy mildew (Bremia lactucae).

[0049] Diseases affecting plants in the family Solanaceae (e.g., eggplant, pepper, petunia, potato, tomato, tobacco) include, but are not limited to, powdery mildew (Leveillula taurica), Phytophthora blight (Phytophthora capsica), late blight (Phytophthora infestans), and blue mold (Peronospora hyoscyami f.sp. tabacina).

[0050] Diseases affecting rapeseed plants include, but are not limited to, blackleg (Leptosphaeria maculan), damping off (Rhizoctonia solani), and downy mildew (Peronospora parasitica).

[0051] Diseases affecting soybean plants include, but are not limited to, downy mildew (Peronospora manshurica).

[0052] Diseases affecting sunflower plants include, but are not limited to, downy mildew (Plasmopara halstedii).

[0053] Diseases affecting maize plants include, but are not limited to, brown stripe downy mildew (Scleropthora rayssiae var. zeae), crazy top (Sclerophthora macrospora), downy mildew (Peronosclerospora sorghi), graminicola downy mildew (Sclerospora graminicola), java downy mildew (Peronospora maydis), and philippine downy mildew (Peronospora philippinensis).

[0054] Diseases affecting sorghum plants include, but are not limited to, downy mildew (Peronosclerospora sorghi).

[0055] A plant having disease resistance may have 5, 10, 15, 20, 25, 30, 35, 40, 45, 50, 55, 60, 65, 70, 75, 80, 85, 90, 95, or 100% increased resistance to a disease compared to a control plant. In some embodiments, a plant may have 5, 10, 15, 20, 25, 30, 35, 40, 45, 50, 55, 60, 65, 70, 75, 80, 85, 90, 95, or 100% increased plant health in the presence of a disease compared to a control plant.

[0056] An “elite line” is any line that has resulted from breeding and selection for superior agronomic performance.

[0057] The term “expression”, as used herein, generally refers to the production of a functional end-product e.g., an mRNA or a protein (precursor or mature).

[0058] A “favorable allele” is the allele at a particular locus (a marker, a QTL, a gene etc.) that confers, or contributes to, an agronomically desirable phenotype, e.g., disease resistance, and that allows the identification of plants with that agronomically desirable phenotype. A favorable allele of a marker is a marker allele that segregates with the favorable phenotype.

[0059] As used herein, “gene” includes a nucleic acid fragment that expresses a functional molecule such as, but not limited to, a specific protein coding sequence and regulatory elements, such as those preceding (5′ non-coding sequences) and following (3′ non-coding sequences) the coding sequence.

[0060] “Genetic markers” are nucleic acids that are polymorphic in a population and where the alleles of which can be detected and distinguished by one or more analytic methods, e.g., RFLP, AFLP, isozyme, SNP, SSR, and the like. The term also refers to nucleic acid sequences complementary to the genomic sequences, such as nucleic acids used as probes. Markers corresponding to genetic polymorphisms between members of a population can be detected by methods well-established in the art. These include, e.g., PCR-based sequence specific amplification methods, detection of restriction fragment length polymorphisms (RFLP), detection of isozyme markers, detection of polynucleotide polymorphisms by allele specific hybridization (ASH), detection of amplified variable sequences of the plant genome, detection of self-sustained sequence replication, detection of simple sequence repeats (SSRs), detection of single nucleotide polymorphisms (SNPs), or detection of amplified fragment length polymorphisms (AFLPs). Well established methods are also known for the detection of expressed sequence tags (ESTs) and SSR markers derived from EST sequences and randomly amplified polymorphic DNA (RAPD).

[0061] “Germplasm” refers to genetic material of or from an individual (e.g., a plant), a group of individuals (e.g., a plant line, variety or family), or a clone derived from a line, variety, species, or culture, or more generally, all individuals within a species or for several species (e.g., maize germplasm collection or Andean germplasm collection). The germplasm can be part of an organism or cell, or can be separate from the organism or cell. In general, germplasm provides genetic material with a specific molecular makeup that provides a physical foundation for some or all of the hereditary qualities of an organism or cell culture. As used herein, germplasm includes cells, seed or tissues from which new plants may be grown, or plant parts, such as leaves, stems, pollen, or cells, that can be cultured into a whole plant.

[0062] A “genomic locus of a plant” as used herein, generally refers to the location on a chromosome of the plant where a gene, such as a polynucleotide involved in disease resistance, is found.

[0063] The term “homologous” refers to nucleic acid sequences that are derived from a common ancestral gene through natural or artificial processes (e.g., are members of the same gene family) and thus, typically, share sequence similarity. Typically, homologous nucleic acids have sufficient sequence identity that one of the sequences or its complement is able to selectively hybridize to the other under selective hybridization conditions. The term “selectively hybridizes” includes reference to hybridization, under stringent hybridization conditions, of a nucleic acid sequence to a specified nucleic acid target sequence to a detectably greater degree (e.g., at least 2-fold over background) than its hybridization to non-target nucleic acid sequences and to the substantial exclusion of non-target nucleic acids. Selectively hybridizing sequences have about at least 80% sequence identity, often at least 90% sequence identity and may have 95%, 97%, 99% or 100% sequence identity with each other. A nucleic acid that exhibits at least some degree of homology to a reference nucleic acid can be unique or identical to the reference nucleic acid or its complementary sequence.

[0064] The term “introduced” means providing a nucleic acid (e.g., expression construct) or protein into a cell. Introduced includes reference to the incorporation of a nucleic acid into a eukaryotic or prokaryotic cell where the nucleic acid may be incorporated into the genome of the cell, and includes reference to the transient provision of a nucleic acid or protein to the cell. Introduced includes reference to stable or transient transformation methods, as well as sexually crossing. Thus, “introduced” in the context of inserting a nucleic acid fragment (e.g., a recombinant DNA construct/expression construct) into a cell, means “transfection” or “transformation” or “transduction” and includes reference to the incorporation of a nucleic acid fragment into a eukaryotic or prokaryotic cell where the nucleic acid fragment may be incorporated into the genome of the cell (e.g., chromosome, plasmid, plastid or mitochondrial DNA), converted into an autonomous replicon, or transiently expressed (e.g., transfected mRNA).

[0065] The term “introgression” refers to the transmission of a desired allele of a genetic locus from one genetic background to another. For example, introgression of a desired allele at a specified locus can be transmitted to at least one progeny via a sexual cross between two parents of the same species, where at least one of the parents has the desired allele in its genome. Alternatively, for example, transmission of an allele can occur by recombination between two donor genomes, e.g., in a fused protoplast, where at least one of the donor protoplasts has the desired allele in its genome. The desired allele can be, e.g., detected by a marker that is associated with a phenotype, at a QTL, a transgene, or the like. Offspring comprising the desired allele may be repeatedly backcrossed to a line having a desired genetic background and selected for the desired allele, to result in the allele becoming fixed in a selected genetic background. The process of “introgressing” is often referred to as “backcrossing” when the process is repeated two or more times.

[0066] “Introgression fragment” or “introgression segment” or “introgression region” refers to a chromosome fragment (or chromosome part or region) which has been introduced into another plant of the same or related species by crossing or traditional breeding techniques, such as backcrossing, i.e. the introgressed fragment is the result of breeding methods referred to by the verb “to introgress” (such as backcrossing). It is understood that the term “introgression fragment” never includes a whole chromosome, but only a part of a chromosome. The introgression fragment can be large, e.g. even half of a chromosome, but is preferably smaller, such as about 15 Mb or less, such as about 10 Mb or less, about 9 Mb or less, about 8 Mb or less, about 7 Mb or less, about 6 Mb or less, about 5 Mb or less, about 4 Mb or less, about 3 Mb or less, about 2 Mb or less, about 1 Mb (equals 1,000,000 base pairs) or less, or about 0.5 Mb (equals 500,000 base pairs) or less, such as about 200,000 bp (equals 200 kilo base pairs) or less, about 100,000 bp (100 kb) or less, about 50,000 bp (50 kb) or less, about 25,000 bp (25 kb) or less.

[0067] A “line” or “strain” is a group of individuals of identical parentage that are generally inbred to some degree and that are generally homozygous and homogeneous at most loci (isogenic or near isogenic). A “subline” refers to an inbred subset of descendants that are genetically distinct from other similarly inbred subsets descended from the same progenitor.

[0068] As used herein, the term “linkage” is used to describe the degree with which one marker locus is associated with another marker locus or some other locus. The linkage relationship between a molecular marker and a locus affecting a phenotype is given as a “probability” or “adjusted probability”. Linkage can be expressed as a desired limit or range. For example, in some embodiments, any marker is linked (genetically and physically) to any other marker when the markers are separated by less than 50, 40, 30, 25, 20, or 15 map units (or cM) of a single meiosis map (a genetic map based on a population that has undergone one round of meiosis, such as e.g. an F2; the IB M2 maps consist of multiple meiosis). In some aspects, it is advantageous to define a bracketed range of linkage, for example, between 10 and 20 cM, between 10 and 30 cM, or between 10 and 40 cM. The more closely a marker is linked to a second locus, the better an indicator for the second locus that marker becomes. Thus, “closely linked loci” such as a marker locus and a second locus display an inter-locus recombination frequency of 10% or less, preferably about 9% or less, still more preferably about 8% or less, yet more preferably about 7% or less, still more preferably about 6% or less, yet more preferably about 5% or less, still more preferably about 4% or less, yet more preferably about 3% or less, and still more preferably about 2% or less. In highly preferred embodiments, the relevant loci display a recombination frequency of about 1% or less, e.g., about 0.75% or less, more preferably about 0.5% or less, or yet more preferably about 0.25% or less. Two loci that are localized to the same chromosome, and at such a distance that recombination between the two loci occurs at a frequency of less than 10% (e.g., about 9%, 8%, 7%, 6%, 5%, 4%, 3%, 2%, 1%, 0.75%, 0.5%, 0.25%, or less) are also said to be “in proximity to” each other. Since one cM is the distance between two markers that show a 1% recombination frequency, any marker is closely linked (genetically and physically) to any other marker that is in close proximity, e.g., at or less than 10 cM distant. Two closely linked markers on the same chromosome can be positioned 9, 8, 7, 6, 5, 4, 3, 2, 1, 0.75, 0.5 or 0.25 cM or less from each other.

[0069] A “locus” is a position on a chromosome, e.g. where a nucleotide, gene, sequence, or marker is located.

[0070] A “marker” is a means of finding a position on a genetic or physical map, or else linkages among markers and trait loci (loci affecting traits). The position that the marker detects may be known via detection of polymorphic alleles and their genetic mapping, or else by hybridization, sequence match or amplification of a sequence that has been physically mapped. A marker can be a DNA marker (detects DNA polymorphisms), a protein (detects variation at an encoded polypeptide), or a simply inherited phenotype. A DNA marker can be developed from genomic nucleotide sequence or from expressed nucleotide sequences (e.g., from a spliced RNA or a cDNA). Depending on the DNA marker technology, the marker may consist of complementary primers flanking the locus and/or complementary probes that hybridize to polymorphic alleles at the locus. A DNA marker, or a genetic marker, may also be used to describe the gene, DNA sequence or nucleotide on the chromosome itself (rather than the components used to detect the gene or DNA sequence) and is often used when that DNA marker is associated with a particular trait in human genetics (e.g. a marker for breast cancer). The term marker locus is the locus (gene, sequence or nucleotide) that the marker detects.

[0071] Markers can be defined by the type of polymorphism that they detect and also the marker technology used to detect the polymorphism. Marker types include but are not limited to, e.g., detection of restriction fragment length polymorphisms (RFLP), detection of isozyme markers, randomly amplified polymorphic DNA (RAPD), amplified fragment length polymorphisms (AFLPs), detection of simple sequence repeats (SSRs), detection of amplified variable sequences of the plant genome, detection of self-sustained sequence replication, or detection of single nucleotide polymorphisms (SNPs). SNPs can be detected e.g. via DNA sequencing, PCR-based sequence specific amplification methods, detection of polynucleotide polymorphisms by allele specific hybridization (ASH), dynamic allele-specific hybridization (DASH), molecular beacons, microarray hybridization, oligonucleotide ligase assays, Flap endonucleases, 5′ endonucleases, primer extension, single strand conformation polymorphism (SSCP) or temperature gradient gel electrophoresis (TGGE). DNA sequencing, such as the pyrosequencing technology has the advantage of being able to detect a series of linked SNP alleles that constitute a haplotype. Haplotypes tend to be more informative (detect a higher level of polymorphism) than SNPs.

[0072] A “marker allele”, alternatively an “allele of a marker locus”, can refer to one of a plurality of polymorphic nucleotide sequences found at a marker locus in a population.

[0073] “Marker assisted selection” (or MAS) is a process by which individual plants are selected based on marker genotypes. “Marker assisted counter-selection” is a process by which marker genotypes are used to identify plants that will not be selected, allowing them to be removed from a breeding program or planting.

[0074] A “marker locus” is a specific chromosome location in the genome of a species where a specific marker can be found. A marker locus can be used to track the presence of a second linked locus, e.g., one that affects the expression of a phenotypic trait. For example, a marker locus can be used to monitor segregation of alleles at a genetically or physically linked locus.

[0075] A “modified nucleotide” or “edited nucleotide” refers to a nucleotide sequence of interest that comprises at least one alteration when compared to its non-modified nucleotide sequence. Such “alterations” include, for example: (i) replacement of at least one nucleotide, (ii) a deletion of at least one nucleotide, (iii) an insertion of at least one nucleotide, or (iv) any combination of (i)-(iii).

[0076] The term “molecular marker” may be used to refer to a genetic marker, as defined above, or an encoded product thereof (e.g., a protein) used as a point of reference when identifying a linked locus. A marker can be derived from genomic nucleotide sequences or from expressed nucleotide sequences (e.g., from a spliced RNA, a cDNA, etc.), or from an encoded polypeptide. The term also refers to nucleic acid sequences complementary to or flanking the marker sequences, such as nucleic acids used as probes or primer pairs capable of amplifying the marker sequence. A “molecular marker probe” is a nucleic acid sequence or molecule that can be used to identify the presence of a marker locus, e.g., a nucleic acid probe that is complementary to a marker locus sequence. Alternatively, in some aspects, a marker probe refers to a probe of any type that is able to distinguish (i.e., genotype) the particular allele that is present at a marker locus. Nucleic acids are “complementary” when they specifically hybridize in solution. Some of the markers described herein are also referred to as hybridization markers when located on an indel region, such as the non-collinear region described herein. This is because the insertion region is, by definition, a polymorphism vis a vis a plant without the insertion. Thus, the marker need only indicate whether the indel region is present or absent. Any suitable marker detection technology may be used to identify such a hybridization marker, e.g. SNP technology is used in the examples provided herein.

[0077] The term “plant” includes whole plants, plant cells, plant protoplast, plant cell or tissue culture from which plants can be regenerated, plant calli, plant clumps and plant cells that are intact in plants or parts of plants, such as seeds, flowers, cotyledons, leaves, stems, buds, roots, root tips and the like. As used herein, a “modified plant” means any plant that has a genetic change due to human intervention. A modified plant may have genetic changes introduced through plant transformation, genome editing (including gene replacement or allele replacement), or conventional plant breeding.

[0078] The terms “polynucleotide”, “polynucleotide sequence”, “nucleic acid sequence”, “nucleic acid fragment”, and “isolated nucleic acid fragment” are used interchangeably herein. These terms encompass nucleotide sequences and the like. A polynucleotide may be a polymer of RNA or DNA that is single- or double-stranded, that optionally contains synthetic, non-natural or altered nucleotide bases. A polynucleotide in the form of a polymer of DNA may be comprised of one or more segments of cDNA, genomic DNA, synthetic DNA, or mixtures thereof.

[0079] The terms “plasmid”, “vector” and “cassette” refer to an extra chromosomal element often carrying genes that are not part of the central metabolism of the cell, and usually in the form of circular double-stranded DNA fragments. Such elements may be autonomously replicating sequences, genome integrating sequences, phage or nucleotide sequences, linear or circular, of a single- or double-stranded DNA or RNA, derived from any source, in which a number of nucleotide sequences have been joined or recombined into a unique construction which is capable of introducing a promoter fragment and DNA sequence for a selected gene product along with appropriate 3′ untranslated sequence into a cell.

[0080] As used herein “altered”, “alteration” or the like in the context of expression (e.g. of RNA or of a protein), refers to any detectable ‘increase’/‘induction’ or ‘decrease’/‘reduction’ in an experimental group (e.g., spinach plant with a modification described herein) as compared to a control group (e.g., wild-type spinach plant that does not comprise the modification).

[0081] As used herein “reduced,” “reduction,” or the like refers to any detectable decrease in an experimental group (e.g., spinach plant with a modification described herein) as compared to a control group (e.g., wild-type spinach plant that does not comprise the modification). Accordingly, reduced expression of a protein comprises any detectable decrease in the total level of the protein in a sample and can be determined using routine methods in the art such as, for example, Western blotting and ELISA.

[0082] As used herein “induced,” “induction,” or the like in the context of expression (e.g. of RNA or of a protein) refers to any detectable increase in an experimental group (e.g., spinach plant with a modification described herein) as compared to a control group (e.g., wild-type spinach plant that does not comprise the modification). Accordingly, increased expression of a protein comprises any detectable increase in the total level of the protein in a sample and can be determined using routine methods in the art such as, for example, Western blotting and ELISA.

[0083] The term “single nucleotide polymorphism” or “SNP” is a DNA sequence variation occurring when a single nucleotide—A, T, C or G—in the genome (or other shared sequence) differs between members of a species (or between paired chromosomes in an individual). For example, two sequenced DNA fragments from different individuals, AAGCCTA to AAGCTTA, contain a difference in a single nucleotide. In this case we say that there are two alleles: C and T. Almost all common SNPs have only two alleles.

[0084] “Spinach” or “cultivated spinach” or “cultivated Spinacia oleracea” refers herein to plants of the species Spinacia oleracea (or seeds from which the plants can be grown), and parts of such plants, bred by humans for food and having good agronomic characteristics. This includes any cultivated spinach, such as breeding lines (e.g. backcross lines, inbred lines), cultivars and varieties (open pollinated or hybrids). This includes any type of spinach, such as savoy, flat- or smooth-leaf spinach or semi-savoy types.

[0085] “Targeted DNA modification” can be used synonymously with targeted DNA mutation and refers to the introduction of a site specification modification that alters or changes the nucleotide sequence at a specific genomic locus of the plant (e.g., spinach). The targeted DNA modification described herein may be any modification known in the art such as, for example, insertion, deletion, single nucleotide polymorphism (SNP), and or a polynucleotide modification. Additionally, the targeted DNA modification in the genomic locus may be located anywhere in the genomic locus, such as, for example, a coding region of the encoded polypeptide (e.g., exon), a non-coding region (e.g., intron), a regulatory element, or untranslated region. The type and location of the targeted DNA modification is not particularly limited so long as the targeted DNA modification results in altered expression or activity of the protein encoded by the S-gene. In certain embodiments the targeted DNA modification is a deletion of one or more nucleotides, preferably contiguous, of the genomic locus.

[0086] An “unfavorable allele” of a marker is a marker allele that segregates with the unfavorable plant phenotype, therefore providing the benefit of identifying plants that can be removed from a breeding program or planting.

[0087] Marker loci that demonstrate statistically significant co-segregation with a disease resistance trait that confers broad resistance against a specified disease or diseases are provided herein. Detection of these loci or additional linked loci and the resistance gene may be used in marker assisted selection as part of a breeding program to produce plants that have resistance to a disease or diseases.

### Genetic Mapping

[0088] It has been recognized for quite some time that specific genetic loci correlating with particular phenotypes, such as disease resistance, can be mapped in an organism's genome. The plant breeder can advantageously use molecular markers to identify desired individuals by detecting marker alleles that show a statistically significant probability of co-segregation with a desired phenotype, manifested as linkage disequilibrium. By identifying a molecular marker or clusters of molecular markers that co-segregate with a trait of interest, the breeder is able to rapidly select a desired phenotype by selecting for the proper molecular marker allele (a process called marker-assisted selection, or MAS). A variety of methods are available for detecting molecular markers or clusters of molecular markers that co-segregate with a trait of interest, such as a disease resistance trait. The basic idea underlying these methods is the detection of markers, for which alternative genotypes (or alleles) have significantly different average phenotypes. Thus, one makes a comparison among marker loci of the magnitude of difference among alternative genotypes (or alleles) or the level of significance of that difference. Trait genes are inferred to be located nearest the marker(s) that have the greatest associated genotypic difference. Two such methods used to detect trait loci of interest are: 1) Population-based association analysis (i.e. association mapping) and 2) Traditional linkage analysis.

### Association Mapping

[0089] Understanding the extent and patterns of linkage disequilibrium (LD) in the genome is a prerequisite for developing efficient association approaches to identify and map quantitative trait loci (QTL). Linkage disequilibrium (LD) refers to the non-random association of alleles in a collection of individuals. When LD is observed among alleles at linked loci, it is measured as LD decay across a specific region of a chromosome. The extent of the LD is a reflection of the recombinational history of that region. The average rate of LD decay in a genome can help predict the number and density of markers that are required to undertake a genome-wide association study and provides an estimate of the resolution that can be expected.

[0090] Association or LD mapping aims to identify significant genotype-phenotype associations. It has been exploited as a powerful tool for fine mapping in outcrossing species such as humans (Corder et al. (1994) “Protective effect of apolipoprotein-E type-2 allele for late-onset Alzheimer-disease,” Nat Genet 7:180-184; Hastbacka et al. (1992) “Linkage disequilibrium mapping in isolated founder populations: diastrophic dysplasia in Finland,” Nat Genet 2:204-211; Kerem et al. (1989) “Identification of the cystic fibrosis gene: genetic analysis,” Science 245:1073-1080) and maize (Remington et al., (2001) “Structure of linkage disequilibrium and phenotype associations in the maize genome,” Proc Natl Acad Sci USA 98:11479-11484; Thornsberry et al. (2001) “Dwarf8 polymorphisms associate with variation in flowering time,” Nat Genet 28:286-289; reviewed by Flint-Garcia et al. (2003) “Structure of linkage disequilibrium in plants,” Annu Rev Plant Biol. 54:357-374), where recombination among heterozygotes is frequent and results in a rapid decay of LD. In inbreeding species where recombination among homozygous genotypes is not genetically detectable, the extent of LD is greater (i.e., larger blocks of linked markers are inherited together) and this dramatically enhances the detection power of association mapping (Wall and Pritchard (2003) “Haplotype blocks and linkage disequilibrium in the human genome,” Nat Rev Genet 4:587-597).

[0091] The recombinational and mutational history of a population is a function of the mating habit as well as the effective size and age of a population. Large population sizes offer enhanced possibilities for detecting recombination, while older populations are generally associated with higher levels of polymorphism, both of which contribute to observably accelerated rates of LD decay. On the other hand, smaller effective population sizes, e.g., those that have experienced a recent genetic bottleneck, tend to show a slower rate of LD decay, resulting in more extensive haplotype conservation (Flint-Garcia et al. (2003) “Structure of linkage disequilibrium in plants,” Annu Rev Plant Biol. 54:357-374).

[0092] Association analyses use quantitative phenotypic scores (e.g., disease tolerance rated from one to nine for each line) in the analysis (as opposed to looking only at tolerant versus resistant allele frequency distributions in intergroup allele distribution types of analysis). The availability of detailed phenotypic performance data collected by breeding programs over multiple years and environments for a large number of elite lines provides a valuable dataset for genetic marker association mapping analyses. This paves the way for a seamless integration between research and application and takes advantage of historically accumulated data sets. However, an understanding of the relationship between polymorphism and recombination is useful in developing appropriate strategies for efficiently extracting maximum information from these resources.

[0093] This type of association analysis neither generates nor requires any map data, but rather is independent of map position. This analysis compares the plants' phenotypic score with the genotypes at the various loci. Subsequently, any suitable map (for example, a composite map) can optionally be used to help observe distribution of the identified QTL markers and/or QTL marker clustering using previously determined map locations of the markers.

### Traditional Linkage Analysis

[0094] The same principles underlie traditional linkage analysis; however, LD is generated by creating a population from a small number of founders. The founders are selected to maximize the level of polymorphism within the constructed population, and polymorphic sites are assessed for their level of cosegregation with a given phenotype. A number of statistical methods have been used to identify significant marker-trait associations. One such method is an interval mapping approach (Lander and Botstein, Genetics 121:185-199 (1989), in which each of many positions along a genetic map (say at 1 cM intervals) is tested for the likelihood that a gene controlling a trait of interest is located at that position. The genotype/phenotype data are used to calculate for each test position a LOD score (log of likelihood ratio). When the LOD score exceeds a threshold value, there is significant evidence for the location of a gene controlling the trait of interest at that position on the genetic map (which will fall between two particular marker loci).

[0095] Marker loci that demonstrate statistically significant co-segregation with a disease resistance trait, as determined by traditional linkage analysis and by Genome Wide Association Studies (GWAS), are provided herein. Detection of these loci or additional linked loci can be used in marker assisted breeding programs to produce plants having disease resistance.

[0096] Activities in marker assisted breeding programs may include but are not limited to: selecting among new breeding populations to identify which population has the highest frequency of favorable nucleic acid sequences based on historical genotype and agronomic trait associations, selecting favorable nucleic acid sequences among progeny in breeding populations, selecting among parental lines based on prediction of progeny performance, and advancing lines in germplasm improvement activities based on presence of favorable nucleic acid sequences.

### Markers

[0097] The present invention provides molecular markers, (i.e., including marker loci and nucleic acids corresponding to (or derived from) these marker loci, such as probes and amplification products) useful for genotyping plants, correlated with a susceptibility(S)) gene in spinach, for example Spov3_chr4_93275081, Spov3_chr4_105049870, Spov3_chr4_107241402, Spov3_chr4_109546568, Spov3_chr4_109698808, Spov3_chr4_112008390, Spov3_chr4_112574123, Spov3_chr4_117783935, Spov3_chr4_118191085, Spov3_chr4_118788268, and Spov3_chr4_121142541 described below. Such molecular markers are useful for selecting spinach plants that are resistant to downy mildew. Accordingly, these markers are useful for marker assisted selection (MAS) and breeding of downy mildew resistant lines and identification of resistant lines. The markers of the invention are also used to identify and define chromosome intervals corresponding to an S-gene. An S-gene can be isolated by positional cloning, e.g. of the genetic interval defined by a pair of markers described herein or subsequences of an interval defined by and including such markers. In addition, an S-gene isolated from one organism, e.g. spinach, can, in turn, serve to isolate homologues of an S-gene in other organisms, including a variety of commercially important crops.

[0098] As is known to those skilled in the art, there are many kinds of molecular markers. For example, molecular markers can include restriction fragment length polymorphisms (RFLP), random amplified polymorphic DNA (RAPD), amplified fragment length polymorphisms (AFLP), single nucleotide polymorphisms (SNP) or simple sequence repeats (SSR).

[0099] Simple sequence repeats (SSR) or microsatellites are regions of DNA where one to a few bases are tandemly repeated for few to hundreds of times. For example, a di-nucleotide repeat would resemble CACACACA and a trinucleotide repeat would resemble ATGATGATGATG. Simple sequence repeats are thought to be generated due to slippage mediated errors during DNA replication, repair and recombination. Over time, these repeated sequences vary in length between one cultivar and another. An example of allelic variation in SSRs would be: Allele A being GAGAGAGA (4 repeats of the GA sequence) and allele B being GAGAGAGAGA (6 repeats of the GA sequence). When SSRs occur in a coding region, their survival depends on their impact on structure and function of the encoded protein. Since repeat tracks are prone to DNA-slippage mediated expansions/deletions, their occurrences in coding regions are limited by non-perturbation of the reading frame and tolerance of expanding amino acid stretches in the encoded proteins. Among all possible SSRs, tri-nucleotide repeats or multiples thereof are more common in coding regions.

[0100] A single nucleotide polymorphism (SNP) is a DNA sequence variation occurring when a single nucleotide—A, T, C or G—differs between members of a species (or between paired chromosomes in an individual). For example, two sequenced DNA fragments from two individuals, AAGCCTA to AAGCTTA, contain a difference in a single nucleotide. In this case, there are two alleles: C and T.

TABLE 1

| | | Position | Reference | Alternate |
|---|---|---|---|---|
| Marker | Chromosome | (bp) | Allele | Allele |
| Spov3_chr4_93275081 | 4 | 93,275,081 | C | T |
| Spov3_chr4_105049870 | 4 | 105,049,870 | G | A |
| Spov3_chr4_107241402 | 4 | 107,241,402 | G | A |
| Spov3_chr4_109546568 | 4 | 109,546,568 | G | A |
| Spov3_chr4_109698808 | 4 | 109,698,808 | G | A |
| Spov3_chr4_112008390 | 4 | 112,008,390 | G | A |
| Spov3_chr4_112574123 | 4 | 112,574,123 | C | T |
| Spov3_chr4_117783935 | 4 | 117,783,935 | C | T |
| Spov3_chr4_118191085 | 4 | 118,191,085 | G | A |
| Spov3_chr4_118788268 | 4 | 118,788,268 | G | A |
| Spov3_chr4_121142541 | 4 | 121,142,541 | G | A |

>Spov3_chr4_93275081-SEQ ID NO: 241 ('C' or 'T' at position 101)
TTTCATGGTGGTGTGGTACAGGTTGAAAAGTTTGTTCAAGATGCCATCTCAAAGGTAACTA
ATTCGTTTTTGGTACACACTAGCCTACTTCCCCTCCTCTYTTGGTTCTTTATGCATAAGCTC
TGAAATCCTTTAACATGAATAGGAGAGCATTGCAATGTTGATGAATTCTGAAGTTCATCCC
CCGCCCCCTTGGTACTC
>Spov3_chr4_105049870-SEQ ID NO: 242 ('G' or 'A' at position 101)
AGAACCAATTAGTTAAACATTGGAACCAATTAGTTAAGCAATGTAACTAATTAGTCAAACA
ATGGGACCAAATAGTTAAGCGATGAAACCAATTAGTTAARCAATCAAATCGGTCTTTTCTG
TAATGCGGTCTTACACAAAAGTTGTCGTTTGAAGTTAGAGTCGATTTCTTTTCACCACTGT
TTTTGGGAGGCAAATCAC
>Spov3_chr4_107241402-SEQ ID NO: 243 ('G' or 'A' at position 101)
TTTTAAGTGTTTATATATAGTGGTGGATATTAGTTGTGCTTAGGGTGGGCCCGACCCCTCT
AGGCGAAAAATTATGTACGGAGTAAAGTACTTTTTTTTARTTATGATCCCCTTAAACTTTGT
GTATAATTGTAAATTACACGGAGTAATATATTACTTCATTTTCTACTGTCGTTCTCATAAAG
CTATAAGGTCCCACGA
>Spov3_chr4_109546568-SEQ ID NO: 244 ('G' or 'A' at position 101)
ATTCACGAAATCTTGGAGATAACGAAAGAATTCCTCGCCGAATTATGATTGCAGGTTACTA
TGATATACCAAAGTGATGAGTTGAGAGCCACAAATATTGRAACTATGAAGATATATTGAAT
GCAACACTAATATCTGATAACTTATATCATTAGCTATTTGCTTTAGCTGATAGTCATTGATT
GTTGGGAGTTTCTTGAC
>Spov3_chr4_109698808-SEQ ID NO: 245 ('G' or 'A' at position 101)
GTTTACGGATTAGTGAGATAAAAGAGTTTCAAGAGTTGATTTCTGGGCTGATTTTGCATTT
TGGAGGATATTTTTACAATTTTGRGTGTTTGGTGTTTTTRTGGAGTAGGTGAGCTGGAGA
ATAATGCGTTTTGGAGTTACATTATGATGATGATGATGGCTTACACAAATTTTGGGGTAGA
AAAGCGATGATGGTTAGCA
>Spov3_chr4_112008390-SEQ ID NO: 246 ('G' or 'A' at position 101)
TAATTTTTACAAGGGTAGTGATGTACTTTCACCATTAAAATGAGGGTGCTTTTAGCGGAAT
AGGACGTCGGATAAAATCATACTCGTGATATTAGGGCTTRAAATACATAGTAGTTGAATTA
AGCTAGTGYTCTAACCGCCTCTCCCTCCCTTCTTACGAAATACTGCCTCTGTTCCACAATA
CATTCATCATTTCTTTTT
>Spov3_chr4_112574123-SEQ ID NO: 247 ('C' or 'T' at position 101)
GCCATTTATAGAAACGGTGCAAGTAATCCGGGACGGCTTTATAAGGAAAGCGGTGCAAGT
ATTCCGGAACGGAGGGAATAATATTCAAGAAATATAAATTYTGATTTAGATAAACCTCTAC
TACATATTTCGTAGTAGGGTAAGAGAAGTTTGTCAACTTTAACATTTGACAAYATGATAAG
CAAAAGAAGACTACGAACG
>Spov3_chr4_117783935-SEQ ID NO: 248 ('C' or 'T' at position 101)
AAGACCATTCAACATAACCCCATCAAATTTAACTCTAGGAAAACACCTTATAATCTCATCCC
ACATACCCAATTTACAAAATCCTCGAAAAACCAAATTCYAAACAGCAACATTCCTCTCTGG
CATTTCATTCAAAACTTTCAACCCATCATCAACAAACCCCATTTGCACATAAAGATCAACGA
TAGAACTCCCAATGTA
>Spov3_chr4_118191085-SEQ ID NO: 249 ('G' or 'A' at position 101)
TGTAAGGTCTCAGCATTGGTGCATATTAGAGAGCTATCATCTACAGGTTGGTTTTGAGGT
GAGATCTGAGCAACCATACAACAGAAGAGTATCACTCTCCRGATGTTCTTTGACTGGTCA
AGAGGGAGACTACGTTGTGCTTCCAAGTAACATCCAGGAGTTGTATGTTGATAATTGCAG
AGACTTTCGTTGCCTATCTGA
>Spov3_chr4_118788268-SEQ ID NO: 250 ('G' or 'A' at position 101)
CGGATGGAGTAGTAAATACAAAAAAAATTGATACAAAAGTGGTGTATTTTTAAGGTAATAA
ATACCAAAAAATCCTACAAAATATCCAATTAACAAATACRAGTACGTAGTACAAGTAGATC
ATACAAACATACTATGATTTTCCCGTATCTATATCGTATCGAAACTTGTGTTTGTGTTCATC
ATCGTCCAATAAAGGGC
>Spov3_chr4_121142541-SEQ ID NO: 251 ('G' or 'A' at position 101)
TGTAATGTAATAATGCAAATATAATGTACTCGAGTAAGTGATAGTCACAGGTTCGATTCCT
CTATCCTCCACTTGTAATTTGCACGGACTACAGAATATARTCCATGTGGCTCATTCGCACC
AAGAAAATGCCTACACAGAAATATTAAGATAAATAGAAAAACTTACAAAAAAGAGTTGCAG
AACAAGGACACTGATCTG

### Linked Markers

[0101] Those of skill in the art will recognize that additional molecular markers can be identified within the intervals defined by the above described pair of markers (e.g., Spov3_chr4_93275081 and Spov3_chr4_121142541). Such markers are also genetically linked to an S-gene, and are within the scope of the present invention. Markers can be identified by any of a variety of genetic or physical mapping techniques. Methods of determining whether markers are genetically linked to an S-gene are known to those of skill in the art and include, for example, interval mapping (Lander and Botstein, (1989) Genetics 121:185), regression mapping (Haley and Knott, (1992) Heredity 69:315) MQM or mapping (Jansen, (1994) Genetics 138:871). In addition, such physical mapping techniques as chromosome walking, contig mapping and assembly, and the like, can be employed to identify and isolate additional sequences useful as markers in the context of the present invention.

### Chromosomal Intervals

[0102] Chromosomal intervals that correlate with the disease resistance trait are provided. A variety of methods are available for identifying chromosomal intervals. The boundaries of such chromosomal intervals are drawn to encompass markers that will be linked to the gene(s) controlling the trait of interest. In other words, the chromosomal interval is drawn such that any marker that lies within that interval (including the terminal markers that define the boundaries of the interval) can be used as a marker for a disease resistance trait.

[0103] Conversely, e.g., if two markers in close proximity show co-segregation with the desired phenotypic trait, it is sometimes unclear if each of those markers identify the same gene or two different gene or multiple genes. Regardless, knowledge of how many genes are in a particular physical/genomic interval is not necessary to make or practice that which is presented in the current disclosure.

[0104] The chromosome 4 interval may encompass any of the markers identified herein as being associated with the DM resistance trait including a “T’ at Spov3_chr4_93275081 (position 101 of reference sequence SEQ ID NO: 241), an “A” at Spov3_chr4_105049870 (position 101 of reference sequence SEQ ID NO: 242), an “A” at Spov3_chr4_107241402 (position 101 of reference sequence SEQ ID NO: 243), an “A” at Spov3_chr4_109546568 (position 101 of reference sequence SEQ ID NO: 244), an “A” at Spov3_chr4_109698808 (position 101 of reference sequence SEQ ID NO: 245), an “A” at Spov3_chr4_112008390 (position 101 of reference sequence SEQ ID NO: 246), a “T” at Spov3_chr4_112574123 (position 101 of reference sequence SEQ ID NO: 247), a “T” at Spov3_chr4_117783935 (position 101 of reference sequence SEQ ID NO: 248), an “A” at Spov3_chr4_118191085 (position 101 of reference sequence SEQ ID NO: 249), an “A” at Spov3_chr4_118788268 (position 101 of reference sequence SEQ ID NO: 250), and an “A” at Spov3_chr4_121142541 (position 101 of reference sequence SEQ ID NO: 251). Any marker located within these intervals can find use as a marker for DM resistance and can be used in the context of the methods presented herein to identify and/or select plants that have resistance to DM, whether it is newly conferred or enhanced compared to a control plant.

[0105] Chromosomal intervals can also be defined by markers that are linked to (show linkage disequilibrium with) a disease resistant gene, and r² is a common measure of linkage disequilibrium (LD) in the context of association studies. If the r² value of LD between a chromosome 4 marker locus in an interval of interest and another chromosome 4 marker locus in close proximity is greater than ⅓ (Ardlie et al, Nature Reviews Genetics 3:299-309 (2002)), the loci are in linkage disequilibrium with one another.

### Detection of Marker Loci

[0106] Markers corresponding to genetic polymorphisms between members of a population can be detected by numerous methods, well-established in the art (e.g., restriction fragment length polymorphisms, isozyme markers, allele specific hybridization (ASH), amplified variable sequences of the plant genome, self-sustained sequence replication, simple sequence repeat (SSR), single nucleotide polymorphism (SNP) or amplified fragment length polymorphisms (AFLP)).

[0107] The majority of genetic markers rely on one or more property of nucleic acids for their detection. For example, some techniques for detecting genetic markers utilize hybridization of a probe nucleic acid to nucleic acids corresponding to the genetic marker. Hybridization formats include but are not limited to, solution phase, solid phase, mixed phase or in situ hybridization assays. Markers which are restriction fragment length polymorphisms (RFLP), are detected by hybridizing a probe (which is typically a sub-fragment or a synthetic oligonucleotide corresponding to a sub-fragment of the nucleic acid to be detected) to restriction digested genomic DNA. The restriction enzyme is selected to provide restriction fragments of at least two alternative (or polymorphic) lengths in different individuals and will often vary from line to line. Determining a (one or more) restriction enzyme that produces informative fragments for each cross is a simple procedure, well known in the art. After separation by length in an appropriate matrix (e.g., agarose) and transfer to a membrane (e.g., nitrocellulose, nylon), the labeled probe is hybridized under conditions which result in equilibrium binding of the probe to the target followed by removal of excess probe by washing.

[0108] Nucleic acid probes to the marker loci can be cloned and/or synthesized. Detectable labels suitable for use with nucleic acid probes include any composition detectable by radio-isotopic, spectroscopic, photochemical, biochemical, immunochemical, electrical, optical or chemical means. Useful labels include biotin for staining with labeled streptavidin conjugate, magnetic beads, fluorescent dyes, radiolabels, enzymes and colorimetric labels. Other labels include ligands which bind to antibodies labeled with fluorophores, chemiluminescent agents and enzymes. Labeling markers is readily achieved such as by the use of labeled PCR primers to marker loci.

[0109] The hybridized probe is then detected using, most typically, autoradiography or other similar detection technique (e.g., fluorography, liquid scintillation counter, etc.). Examples of specific hybridization protocols are widely available in the art, see, e.g., Berger, Sambrook, Ausubel, all supra.

[0110] Amplified variable sequences refer to amplified sequences of the plant genome which exhibit high nucleic acid residue variability between members of the same species. All organisms have variable genomic sequences and each organism (with the exception of a clone) has a different set of variable sequences. Once identified, the presence of specific variable sequence can be used to predict phenotypic traits. Preferably, DNA from the plant serves as a template for amplification with primers that flank a variable sequence of DNA. The variable sequence is amplified and then sequenced.

[0111] In vitro amplification techniques are well known in the art. Examples of techniques sufficient to direct persons of skill through such in vitro methods, including the polymerase chain reaction (PCR), the ligase chain reaction (LCR), QB-replicase amplification and other RNA polymerase mediated techniques (e.g., NASBA), are found in Berger, Sambrook and Ausubel (all supra) as well as Mullis, et al., (1987) U.S. Pat. No. 4,683,202; PCR Protocols, A Guide to Methods and Applications (Innis, et al., eds.) Academic Press Inc., San Diego Academic Press Inc. San Diego, Calif. (1990) (Innis); Arnheim and Levinson, (Oct. 1, 1990) C&EN 36-47; The Journal Of NIH Research (1991) 3:81-94; (Kwoh, et al., (1989) Proc. Natl. Acad. Sci. USA 86:1173; Guatelli, et al., (1990) Proc. Natl. Acad. Sci. USA 87:1874; Lomeli, et al., (1989) J. Clin. Chem 35:1826; Landegren, et al. (1988) Science 241:1077-1080; Van Brunt, (1990) Biotechnology 8:291-294; Wu and Wallace, (1989) Gene 4:560; Barringer, at al., (1990) Gene 89:117 and Sooknanan and Malek, (1995) Biotechnology 13:563-564. Improved methods of cloning in vitro amplified nucleic acids are described in Wallace, et al., U.S. Pat. No. 5,426,039. Improved methods of amplifying large nucleic acids by PCR are summarized in Cheng, et al., (1994) Nature 369:684, and the references therein, in which PCR amplicons of up to 40 kb are generated. One of skill will appreciate that essentially any RNA can be converted into a double stranded DNA suitable for restriction digestion, PCR expansion and sequencing using reverse transcriptase and a polymerase. See, Ausubel, Sambrook and Berger, all supra.

[0112] Oligonucleotides for use as primers, e.g., in amplification reactions and for use as nucleic acid sequence probes, are typically synthesized chemically according to the solid phase phosphoramidite triester method described by Beaucage and Caruthers, (1981) Tetrahedron Lett. 22:1859 or can simply be ordered commercially.

[0113] Alternatively, self-sustained sequence replication can be used to identify genetic markers. Self-sustained sequence replication refers to a method of nucleic acid amplification using target nucleic acid sequences which are replicated exponentially in vitro under substantially isothermal conditions by using three enzymatic activities involved in retroviral replication: (1) reverse transcriptase, (2) Rnase H and (3) a DNA-dependent RNA polymerase (Guatelli, et al., (1990) Proc Natl Acad Sci USA 87:1874). By mimicking the retroviral strategy of RNA replication by means of cDNA intermediates, this reaction accumulates cDNA and RNA copies of the original target

[0114] As mentioned above, there are many different types of molecular markers, including amplified fragment length polymorphisms (AFLP), allele-specific hybridization (ASH), single nucleotide polymorphisms (SNP), simple sequence repeats (SSR) and isozyme markers. Methods of using the different types of molecular markers are known to those skilled in the art. The markers of the present invention include simple sequence repeats and single nucleotide polymorphisms.

### Kits

[0115] Kits are also provided to facilitate the screening of germplasm for the markers of the present invention. The kits comprise the polynucleotides of the present invention, fragments or complements thereof, for use as probes or primers to detect the markers for an S-gene. Instructions for using the polynucleotides, as well as buffers and/or other solutions may also be provided to facilitate the use of the polynucleotides.

### Marker Assisted Selection and Breeding of Plants

[0116] The spinach plants of the disclosure may be used in a plant breeding program. The goal of plant breeding is to combine, in a single variety or hybrid, various desirable agronomic traits. For field crops, these traits may include, for example, resistance to diseases and insects, tolerance to heat and drought, tolerance to chilling or freezing, reduced time to crop maturity, greater yield and better agronomic quality. With mechanical harvesting of many crops, uniformity of plant characteristics such as germination and stand establishment, growth rate, maturity and plant and ear height is desirable. Traditional plant breeding is an important tool in developing new and improved commercial crops. This disclosure encompasses methods for producing a plant by crossing a first parent plant with a second parent plant wherein one or both of the parent plants is a plant displaying a phenotype as described herein.

[0117] Plant breeding techniques known in the art and used in a plant breeding program include, but are not limited to, recurrent selection, bulk selection, mass selection, backcrossing, pedigree breeding, open pollination breeding, restriction fragment length polymorphism enhanced selection, genetic marker enhanced selection, doubled haploids and transformation. Often combinations of these techniques are used. Marker loci and the alleles provided herein can be used in marker assisted selection (MAS) breeding. The more tightly linked a marker is with a DNA locus influencing a phenotype (e.g., disease resistance), the more reliable the marker is in MAS, as the likelihood of a recombination event unlinking the marker and the locus decreases. Markers containing the causal polymorphism for a trait, or that are within the coding sequence of a causative gene, are ideal as no recombination is expected between them and the sequence of DNA responsible for the phenotype. However, markers do not need to contain or correspond to casual polymorphisms in order to be effective in MAS. In fact, most MAS breeding only uses markers linked to a causal mutation.

[0118] Developing molecular markers in crop species can increase efficiency in plant breeding through MAS. Genetic markers are used to identify plants that contain a desired genotype at one or more loci, and that are expected to transfer the desired genotype, along with a desired phenotype to their progeny. Genetic markers can be used to identify plants containing a desired genotype at one locus, or at several unlinked or linked loci (e.g., a haplotype), and that would be expected to transfer the desired genotype, along with a desired phenotype to their progeny.

[0119] In general, MAS uses polymorphic markers that have been identified as having a significant likelihood of co-segregation with a desired trait. Such markers are presumed to map near a gene or genes that give the plant its desired phenotype, and are considered indicators for the desired trait.

[0120] Identification of plants or germplasm that include a marker locus or marker loci linked to a desired trait or traits provides a basis for performing MAS. Plants that comprise favorable markers or favorable alleles are selected for, while plants that comprise markers or alleles that are negatively correlated with the desired trait can be selected against. Desired markers and/or alleles can be introgressed into plants having a desired (e.g., elite or exotic) genetic background to produce an introgressed plant or germplasm having the desired trait. In some aspects, it is contemplated that a plurality of markers for desired traits are sequentially or simultaneous selected and/or introgressed. The combinations of markers that are selected for in a single plant is not limited, and can include any combination of markers disclosed herein or any marker linked to the markers disclosed herein.

[0121] The present disclosure provides the means to identify disease resistant spinach plants that comprise altered expression of an S-gene by identifying plants having a specified allele, e.g., at one or more of markers Spov3_chr4_93275081, Spov3_chr4_105049870, Spov3_chr4_107241402, Spov3_chr4_109546568, Spov3_chr4_109698808, Spov3_chr4_112008390, Spov3_chr4_112574123, Spov3_chr4_117783935, Spov3_chr4_118191085, Spov3_chr4_118788268, and Spov3_chr4_121142541. Similarly, by identifying plants lacking the desired allele, plants without the disease resistance can be identified and, e.g., eliminated from subsequent crosses.

[0122] MAS is a powerful shortcut to select for desired phenotypes and for introgressing desired traits into cultivars (e.g., introgressing desired traits into elite lines). MAS is easily adapted to high throughput molecular analysis methods that can quickly screen large numbers of plant or germplasm genetic material for the markers of interest and is much more cost effective than cultivating and observing plants for visible traits.

[0123] When a population is segregating for multiple loci affecting one of multiple traits, e.g., multiple loci involved in disease resistance, the efficiency of MAS compared to phenotypic screening becomes even greater, because all of the loci can be evaluated together from a single sample of DNA.

[0124] Another use of MAS in plant breeding is to assist the recovery of the recurrent parent genotype by backcross breeding. Backcross breeding is the process of crossing a progeny back to one of its parents. Backcrossing is usually done for the purpose of introgressing one or a few loci from a donor parent into an otherwise desirable genetic background from the recurrent parent. The more cycles of backcrossing that are done, the greater the genetic contribution of the recurrent parent to the resulting variety. This is often necessary, because donor parent plants may be otherwise undesirable, i.e., due to low yield, low fecundity or the like. In contrast, varieties which are the result of intensive breeding programs may have excellent yield, fecundity or the like, merely being deficient in one desired trait. As a skilled worker understands, backcrossing can be done to select for or against a trait.

[0125] The introgression of one or more desired loci from a donor line into another is achieved via repeated backcrossing to a recurrent parent accompanied by selection to retain one or more loci from the donor parent. Markers associated with sex determination are assayed in progeny and those progeny with one or more desired markers are selected for advancement. In another aspect, one or more markers can be assayed in the progeny to select for plants with the genotype of the parent. This invention anticipates that trait introgression activities will require more than one generation, wherein progeny are crossed to the recurrent parent or selfed. Selections are made based on the presence of one or more sex determination markers and can also be made based on the recurrent parent genotype, wherein screening is performed on a genetic marker and/or phenotype basis. In another embodiment, the markers can be used in conjunction with other markers, ideally at least one on each chromosome of the spinach genome, to track the introgression into elite germplasm.

### Positional Cloning

[0126] The molecular markers of the present invention, for example, Spov3_chr4_93275081, Spov3_chr4_105049870, Spov3_chr4_107241402, Spov3_chr4_109546568, Spov3_chr4_109698808, Spov3_chr4_112008390, Spov3_chr4_112574123, Spov3_chr4_117783935, Spov3_chr4_118191085, Spov3_chr4_118788268, Spov3_chr4_121142541, etc., and nucleic acids homologous thereto, can be used, as indicated previously, to identify additional linked marker loci, which can be cloned by well established procedures, e.g., as described in detail in Ausubel, Berger and Sambrook, supra. Similarly, these markers and genes as well as any additionally identified linked molecular markers can be used to physically isolate, e.g., by cloning, nucleic acids associated with markers contributing to fertility restoration. Such nucleic acids, i.e., linked to the marker, have a variety of uses, including as genetic markers for identification of additional markers in subsequent applications of marker assisted selection (MAS). Such nucleic acids may also include an S-gene itself.

[0127] These nucleic acids are first identified by their genetic linkage to markers of the present invention. Isolation of the nucleic acid of interest is achieved by any number of methods as discussed in detail in such references as Ausubel, Berger and Sambrook, supra, and Clark, Ed. (1997) Plant Molecular Biology: A Laboratory Manual Springer-Verlag, Berlin.

[0128] For example, “Positional gene cloning” uses the proximity of a genetic marker to physically define an isolated chromosomal fragment that is linked to a gene. The isolated chromosomal fragment can be produced by such well known methods as digesting chromosomal DNA with one or more restriction enzymes or by amplifying a chromosomal region in a polymerase chain reaction (PCR) or alternative amplification reaction or by direct Sanger sequencing. The digested or amplified fragment is typically ligated into a vector suitable for replication, e.g., a plasmid, a cosmid, a phage, an artificial chromosome, or the like and optionally expression, of the inserted fragment. Markers which are adjacent to an open reading frame (ORF) associated with a phenotypic trait can hybridize to a DNA clone, thereby identifying a clone on which an ORF is located. If the marker is more distant, a fragment containing the open reading frame is identified by successive rounds of screening and isolation of clones which together comprise a contiguous sequence of DNA, a “contig.” Protocols sufficient to guide one of skill through the isolation of clones associated with linked markers are found in, e.g. Berger, Sambrook and Ausubel, all supra.

### Isolated Chromosome Region and Isolated S-Gene

[0129] The present invention provides the chromosome region comprising sequences associated with an S-gene involved in disease resistance. The gene is localized in the region defined by two markers of the present invention (Spov3_chr4_93275081 (SEQ ID NO: 241) and Spov3_chr4_121142541 (SEQ ID NO: 251)) wherein each marker is genetically linked to the gene. A chromosome region can contain one or more ORFs associated with disease resistance, and can be cloned on one or more individual vectors, e.g., depending on the size of the chromosome region. For example, in the present invention three genes were identified within the interval flanked by SNP markers Spov3_chr4_93275081 and Spov3_chr4_121142541. In general, there are three recognized groups of S-genes acting during different stages of infection: early pathogen establishment, modulation of host defenses, and pathogen sustenance (Annu Rev Phytopathol. 2014; 52:551-81).

[0130] The present invention provides, inter alia, isolated nucleic acids of DNA, RNA, homologs, paralogs and orthologs and/or chimeras thereof, comprising an S-gene polynucleotide and proteins encoded thereby. This includes naturally occurring as well as synthetic variants and homologs of the sequences.

[0131] Clathrin adaptor medium subunit polypeptides are encompassed by the disclosure. “Clathrin adaptor medium subunit polypeptide” and “clathrin adaptor medium subunit protein” as used herein interchangeably refers to a polypeptide(s) associated with disease resistance, and is sufficiently identical to the spinach clathrin adaptor medium subunit polypeptide of SEQ ID NO: 6. A variety of clathrin adaptor medium subunit polypeptides are contemplated.

[0132] Pentatricopeptide repeat-containing polypeptides are encompassed by the disclosure. “Pentatricopeptide repeat-containing polypeptide” and “pentatricopeptide repeat-containing protein” as used herein interchangeably refers to a polypeptide(s) associated with disease resistance, and is sufficiently identical to the spinach pentatricopeptide repeat-containing polypeptide of SEQ ID NO: 98. A variety of pentatricopeptide repeat-containing polypeptides are contemplated.

[0133] Resistant to Pseudomonas syringae 2-like (RPS2-like) resistance polypeptides are encompassed by the disclosure. “RPS2-like resistance polypeptide” and “RPS2-like resistance protein” as used herein interchangeably refers to a polypeptide(s) associated with disease resistance, and is sufficiently identical to the spinach RPS2-like resistance polypeptide of SEQ ID NO: 174. A variety of RPS2-like resistance polypeptides are contemplated.

[0134] “Sufficiently identical” is used herein to refer to an amino acid sequence that has at least about 70%, 71%, 72%, 73%, 74%, 75%, 76%, 77%, 78%, 79%, 80%, 81%, 82%, 83%, 84%, 85%, 86%, 87%, 88%, 89%, 90%, 91%, 92%, 93%, 94%, 95%, 96%, 97%, 98%, 99% or greater sequence identity. In some embodiments the sequence identity is against the full length sequence of a polypeptide. The term “about” when used herein in context with percent sequence identity means+/−1.0%.

[0135] “Fragments” or “biologically active portions” include polypeptide or polynucleotide fragments comprising sequences sufficiently identical to a clathrin adaptor medium subunit, a pentatricopeptide repeat-containing, or an RPS2-like resistance polypeptide or polynucleotide, respectively.

[0136] “Variants” as used herein refers to proteins or polypeptides having an amino acid sequence that is at least about 50%, 55%, 60%, 65%, 70%, 75%, 80%, 81%, 82%, 83%, 84%, 85%, 86%, 87%, 88%, 89%, 90%, 91%, 92%, 93%, 94%, 95%, 96%, 97%, 98%, 99% or greater identical to the parental amino acid sequence.

[0137] In some embodiments a clathrin adaptor medium subunit polypeptide, a pentatricopeptide repeat-containing polypeptide, or an RPS2-like resistance polypeptide comprises an amino acid sequence having at least about 40%, 45%, 50%, 51%, 52%, 53%, 54%, 55%, 56%, 57%, 58%, 59%, 60%, 61%, 62%, 63%, 64%, 65%, 66%, 67%, 68%, 69%, 70%, 71%, 72%, 73%, 74%, 75%, 76%, 77%, 78%, 79%, 80%, 81%, 82%, 83%, 84%, 85%, 86%, 87%, 88%, 89%, 90%, 91%, 92%, 93%, 94%, 95%, 96%, 97%, 98%, 99% or greater identity to the full length or a fragment of the amino acid sequence of SEQ ID NO: 6, SEQ ID NO: 98, or SEQ ID NO: 174.

[0138] Sequences homologous, i.e., that share significant sequence identity or similarity, to those provided herein are also an aspect of the invention. Homologous sequences can be derived from any plant including monocots and dicots and in particular agriculturally important plant species, including but not limited to, crops such as soybean, wheat, corn (maize), potato, cotton, rape (including canola), sunflower, alfalfa, clover, sugarcane, and turf; or fruits and vegetables, such as banana, blackberry, blueberry, strawberry, and raspberry, cantaloupe, carrot, cauliflower, coffee, cucumber, eggplant, grapes, honeydew, lettuce, mango, melon, onion, papaya, peas, peppers, pineapple, pumpkin, spinach, squash, sweet corn, tobacco, tomato, tomatillo, watermelon, rosaceous fruits (such as apple, peach, pear, cherry and plum) and vegetable brassicas (such as broccoli, cabbage, cauliflower, Brussels sprouts, and kohlrabi). Other crops, including fruits and vegetables, whose phenotype can be changed and which comprise homologous sequences include basil, barley; rye; millet; sorghum; currant; avocado; hops; citrus fruits such as oranges, lemons, grapefruit and tangerines, artichoke, cherries; endive; leek; roots such as arrowroot, beet, cassava, turnip, radish, yam, and sweet potato; and beans. In addition, homologous sequences may be derived from plants that are evolutionarily-related to crop plants, but which may not have yet been used as crop plants.

[0139] Homologous sequences can comprise orthologous or paralogous sequences. Several different methods are known by those of skill in the art for identifying and defining these functionally homologous sequences. Three general methods for defining orthologs and paralogs are described; an ortholog, paralog or homolog may be identified by one or more of the methods described below.

[0140] Orthologs and paralogs are evolutionarily related genes that have similar sequence and similar functions. Orthologs are structurally related genes in different species that are derived by a speciation event. Paralogs are structurally related genes within a single species that are derived by a duplication event.

[0141] Within a single plant species, gene duplication may result in two copies of a particular gene, giving rise to two or more genes with similar sequence and often similar function known as paralogs. A paralog is therefore a similar gene formed by duplication within the same species. Paralogs typically cluster together or in the same clade (a group of similar genes) when a gene family phylogeny is analyzed using programs such as CLUSTAL (Thompson et al. (1994) Nucleic Acids Res. 22:4673-4680; Higgins et al. (1996) Methods Enzymol. 266:383-402). Groups of similar genes can also be identified with pair-wise BLAST analysis (Feng and Doolittle (1987) J. Mol. Evol. 25:351-360).

[0142] For example, a clade of very similar MADS domain transcription factors from Arabidopsis all share a common function in flowering time (Ratcliffe et al. (2001) Plant Physiol. 126:122-132), and a group of very similar AP2 domain transcription factors from Arabidopsis are involved in tolerance of plants to freezing (Gilmour et al. (1998) Plant J. 16:433-442). Analysis of groups of similar genes with similar function that fall within one clade can yield sub-sequences that are particular to the clade. These sub-sequences, known as consensus sequences, can not only be used to define the sequences within each clade, but define the functions of these genes; genes within a clade may contain paralogous sequences, or orthologous sequences that share the same function (see also, for example, Mount (2001), in Bioinformatics: Sequence and Genome Analysis Cold Spring Harbor Laboratory Press, Cold Spring Harbor, N.Y., page 543.)

[0143] Speciation, the production of new species from a parental species, can also give rise to two or more genes with similar sequence and similar function. These genes, termed orthologs, often have an identical function within their host plants and are often interchangeable between species without losing function. Because plants have common ancestors, many genes in any plant species will have a corresponding orthologous gene in another plant species. Once a phylogenic tree for a gene family of one species has been constructed using a program such as CLUSTAL (Thompson et al. (1994) Nucleic Acids Res. 22:4673-4680; Higgins et al. (1996) supra) potential orthologous sequences can be placed into the phylogenetic tree and their relationship to genes from the species of interest can be determined. Orthologous sequences can also be identified by a reciprocal BLAST strategy. Once an orthologous sequence has been identified, the function of the ortholog can be deduced from the identified function of the reference sequence.

[0144] Orthologous genes from different organisms have highly conserved functions, and very often essentially identical functions (Lee et al. (2002) Genome Res. 12:493-502; Remm et al. (2001) J. Mol. Biol. 314:1041-1052). Paralogous genes, which have diverged through gene duplication, may retain similar functions of the encoded proteins. In such cases, paralogs can be used interchangeably with respect to certain embodiments of the instant invention (for example, transgenic expression of a coding sequence).

[0145] Exemplary sequences homologous to the spinach clathrin adaptor medium subunit polynucleotide (SEQ ID NOs: 4 or 5) are set forth in SEQ ID NOS: 7-63, 252-293 and summarized in Tables 2, 5, 6, and 7. SEQ ID NO: 6 relates to the spinach clathrin adaptor medium subunit protein sequence, and homologous protein sequences from other plant species are shown in SEQ ID NOs: 64-92. Additional homologous protein sequences are set forth in SEQ ID NOs: 294-315.

[0146] Exemplary sequences homologous to the spinach pentatricopeptide repeat-containing polynucleotide (SEQ ID NOs: 96 or 97) are set forth in SEQ ID NOs: 99-144, 317-325 and summarized in Tables 3, 5, 6, and 7. SEQ ID NO: 98 relates to the pentatricopeptide repeat-containing protein sequence, and homologous protein sequences from other plant species are shown in SEQ ID NOs: 145-168. Additional homologous protein sequences are set forth in SEQ ID NOs: 326-330.

[0147] Exemplary sequences homologous to the spinach RPS2-like resistance polynucleotide (SEQ ID NOs: 172 or 173) are set forth in SEQ ID NOs: 175-218, 331-332 and summarized in Tables 4 and 6. Homologous protein sequences are set forth in SEQ ID NOs: 219-240 and 333.

TABLE 2

| Organism | Common name | Gene ID | Locus | Transcript ID | E-value | Bit score | % Identity | % Gaps |
|---|---|---|---|---|---|---|---|---|
| Spinacia | spinach | PAC: 45131357 | Spov3_chr4.04752 | (SEQ ID NO: 5) | | | 100.00 | |
| oleracea | | | (SEQ ID NO: 4) | | | | | |
| Beta vulgaris | beet, swiss | 104897272 | LOC104897272 | XM_010684118.2 | 0 | 874.00 | 97.20 | 0 |
| subsp. | chard | | (SEQ ID NO: 7) | (SEQ ID NO: 35) | | | | |
| vulgaris | | | | | | | | |
| Brassica | rapeseed | 106420212 | LOC106420212 | XM_013861063.2 | 0 | 832.40 | 90.65 | 0 |
| napus | | | (SEQ ID NO: 8) | (SEQ ID NO: 36) | | | | |
| | | 106307948 | LOC106307948 | XM_013745046.1 | 0 | 832.02 | 90.42 | 0 |
| Brassica | wild cabbage | 106307948 | LOC106307948 | XM_013745046.1 | 0 | 832.02 | 90.42 | 0 |
| oleracea var. | | | (SEQ ID NO: 9) | (SEQ ID NO: 37) | | | | |
| oleracea | | | | | | | | |
| Capsicum | pepper | 107855741 | LOC107855741 | XM_016700750.1 | 0 | 832.79 | 91.36 | 0.47 |
| annuum | | | (SEQ ID NO: 10) | (SEQ ID NO: 38) | | | | |
| Chenopodium | quinoa | 110709217 | LOC110709217 | XM_021887429.1 | 0 | 876.70 | 98.36 | 0 |
| quinoa | | | (SEQ ID NO: 11) | (SEQ ID NO: 39) | | | | |
| | | 110712623 | LOC110712623 | XM_021891097.1 | 0 | 875.93 | 98.13 | 0 |
| | | | (SEQ ID NO: 12) | (SEQ ID NO: 40) | | | | |
| Citrullus | watermelon | Cla97Chr05 | Cla97C05G107810 | Cla97C05G107810.1 | 0 | 849.35 | 93.69 | 0 |
| lanatus | | | (SEQ ID NO: 13) | (SEQ ID NO: 41) | | | | |
| Cucurbita | winter squash | 111477743 | LOC111477743 | XM_023121629.1 | 0 | 848.58 | 93.69 | 0 |
| maxima | | | (SEQ ID NO: 16) | (SEQ ID NO: 44) | | | | |
| Cucumis | melon | 103488980 | LOC103488980 | XM_008447952.2 | 0 | 847.81 | 93.46 | 0 |
| melo | | | (SEQ ID NO: 14) | (SEQ ID NO: 42) | | | | |
| Cucurbita | summer | 111804264 | LOC111804264 | XM_023689006.1 | 0 | 848.58 | 93.69 | 0 |
| pepo subsp. | squash, | | (SEQ ID NO: 17) | (SEQ ID NO: 45) | | | | |
| pepo | zucchini | | | | | | | |
| Cucumis | cucumber | 101219697 | LOC101219697 | XM_004135216.3 | 0 | 845.88 | 93.22 | 0 |
| sativus | | | (SEQ ID NO: 15) | (SEQ ID NO: 43) | | | | |
| Daucus | carrot | 108202955 | LOC108202955 | XM_017371598.1 | 0 | 832.40 | 91.12 | 0 |
| carota | | | (SEQ ID NO: 18) | (SEQ ID NO: 46) | | | | |
| subsp. | | | | | | | | |
| sativus | | | | | | | | |
| Eruca | rocket | PAC: 39943752 | Eruve.3560s0005 | Eruve.3560s0005.1 | 0 | 830.09 | 90.19 | 0 |
| vesicaria | | | (SEQ ID NO: 19) | (SEQ ID NO: 47) | | | | |
| | | PAC: 39892663 | Eruve.1325s0030 | Eruve.1325s0030.1 | 0 | 830.09 | 90.19 | 0 |
| | | | (SEQ ID NO: 20) | (SEQ ID NO: 48) | | | | |
| Glycine max | soybean | 100789477 | LOC100789477 | XM_003551989.4 | 0 | 843.96 | 92.29 | 0 |
| | | | (SEQ ID NO: 21) | (SEQ ID NO: 49) | | | | |
| | | 100801068 | LOC100801068 | XM_003531942.3 | 0 | 843.96 | 92.29 | 0 |
| | | | (SEQ ID NO: 22) | (SEQ ID NO: 50) | | | | |
| Helianthus | sunflower | 110895091 | LOC110895091 | XM_022142374.2 | 0 | 847.81 | 93.46 | 0 |
| annuus | | | (SEQ ID NO: 23) | (SEQ ID NO: 51) | | | | |
| | | | | XM_022142375.2 | 0 | 847.81 | 93.46 | 0 |
| | | | | (SEQ ID NO: 52) | | | | |
| Humulus | common hop | FID: 1178425274 | HL.Tea.v1.0.G009494 | HL.Tea.v1.0.G009494.1 | 0 | 811.99 | 84.42′ | 7.36 |
| lupulus var. | | | (SEQ ID NO: 24) | (SEQ ID NO: 53) | | | | |
| lupulus | | | | | | | | |
| Lactuca | lettuce | 111882293 | LOC111882293 | XM_023878647.1 | 0 | 840.49 | 92.29 | 0 |
| sativa | | | (SEQ ID NO: 25) | (SEQ ID NO: 54) | | | | |
| Nicotiana | tobacco | 107768126 | LOC107768126 | XM_016587229.1 | 0 | 833.56 | 91.59 | 0.47 |
| tabacum | | | (SEQ ID NO: 26) | (SEQ ID NO: 55) | | | | |
| Ocimum | basil | FID: 3233744503 | 481.g272 | 481.g272.t1 | 0 | 846.65 | 93.69 | 0 |
| basilicum | | | (SEQ ID NO: 27) | (SEQ ID NO: 56) | | | | |
| var. | | FID: 3233710071 | 385868.g31 | 385868.g31.t1 | 0 | 848.20 | 93.69 | 0 |
| Genoveser | | | (SEQ ID NO: 28) | (SEQ ID NO: 57) | | | | |
| Phaseolus | common bean | 18634066 | PHAVU_003G063300g | XM_007153765.1 | 0 | 840.11 | 92.06 | 0 |
| vulgaris | | | (SEQ ID NO: 29) | (SEQ ID NO: 58) | | | | |
| Solanum | tomato | 101264626 | LOC101264626 | XM_004239071.4 | 0 | 827.78 | 97.20 | 0 |
| lycopersicum | | | (SEQ ID NO: 30) | (SEQ ID NO: 59) | | | | |
| Solanum | potato | 102586521 | LOC102586521 | XM_006357553.2 | 0 | 827.78 | 90.89 | 0.47 |
| tuberosum | | | (SEQ ID NO: 31) | (SEQ ID NO: 60) | | | | |
| | | 102589986 | LOC102589986 | XM_006366304.2 | 0 | 825.85 | 90.40 | 0.47 |
| | | | (SEQ ID NO: 32) | (SEQ ID NO: 61) | | | | |
| Vitis | grape | PAC: 38047563 | VIT_200s0225g00220 | VIT_200s0225g00220.1 | 0 | 844.00 | 93.00 | 0 |
| vinifera | | | (SEQ ID NO: 33) | (SEQ ID NO: 62) | | | | |
| Zea mays | maize | 103651285 | LOC103651285 | NM_001301599.1 | 0 | 822.39 | 90.21 | 0.23 |
| | | | (SEQ ID NO: 34) | (SEQ ID NO: 63) | | | | |
| Zea mays | maize | 103651285 | LOC103651285 | NM_001301599.1 | 0 | 822.39 | 90.21 | 0.23 |
| | | | (SEQ ID NO: 34) | (SEQ ID NO: 63) | | | | |

TABLE 3

| | | | | | E- | | % | |
|---|---|---|---|---|---|---|---|---|
| Organism | Common name | Gene ID | Locus | Transcript ID | value | Bit score | Identity | % Gaps |
| Spinacia | spinach | | Sp75 Spo10764 | (SEQ ID NO: 97) | | | 100.00 | |
| oleracea | | | (SEQ ID NO: 96) | | | | | |
| Beta vulgaris | beet, swiss | 104897370 | LOC104897370 | XM_010684230.2 | 0 | 1023.85 | 78.73 | 0.15 |
| subsp. | chard | | (SEQ ID NO: 99) | (SEQ ID NO: 122) | | | | |
| vulgaris | | | | | | | | |
| Brassica | rapeseed | | RID46578 | | 0 | 582.02 | 51.78 | 0.51 |
| napus | | | | | | | | |
| Brassica | wild cabbage | 106343209 | LOC106343209 | XM_013782361.1 | 0 | 605.13 | 49.84 | 0.16 |
| oleracea var. | | | (SEQ ID NO: 100) | (SEQ ID NO: 123) | | | | |
| oleracea | | | | | | | | |
| Capsicum | pepper | 107852979 | LOC107852979 | XM_016698013.1 | 0 | 635.95 | 52.02 | 0.48 |
| annuum | | | (SEQ ID NO: 101) | (SEQ ID NO: 124) | | | | |
| Chenopodium | quinoa | 110708874 | LOC110708874 | XM_021887098.1 | 0 | 1061.98 | 84.4 | 0 |
| quinoa | | | (SEQ ID NO: 102) | (SEQ ID NO: 125) | | | | |
| Citrullus | watermelon | Cla97Chr08 | Cla97C08G161690 | Cla97C08G161690.1 | | | | |
| lanatus | | | (SEQ ID NO: 103) | (SEQ ID NO: 126) | | | | |
| Cucurbita | winter squash | 111492496 | LOC111492496 | (SEQ ID NO: 127) | 0 | 657.52 | 53.22 | 0.47 |
| maxima | | | (SEQ ID NO: 104) | | | | | |
| Cucumis | melon | 107990292 | LOC107990292 | XM_017044416.1 | 0 | 621.70 | 51.86 | 0.32 |
| melo | | | (SEQ ID NO: 105) | (SEQ ID NO: 128) | | | | |
| Cucurbita | summer | 111805017 | LOC111805017 | XM_023689874.1 | 0 | 659.06 | 53.06 | 0.47 |
| pepo subsp. | squash, | | (SEQ ID NO: 106) | (SEQ ID NO: 129) | | | | |
| pepo | zucchini | | | | | | | |
| Cucumis | cucumber | 105434631 | LOC105434631 | XM_023141844.1 | 0 | 657.52 | 53.22 | 0.47 |
| sativus | | | (SEQ ID NO: 107) | (SEQ ID NO: 130) | | | | |
| Daucus | carrot | 108201762 | LOC108201762 | XM_017370050.1 | 0 | 639.03 | 52.77 | 0 |
| carota | | | (SEQ ID NO: 108) | (SEQ ID NO: 131) | | | | |
| subsp. | | | | | | | | |
| sativus | | | | | | | | |
| Eruca | rocket | PAC: 39943401 | Eruve.1454s0028 | Eruve.1454s0028.1 | 0 | 539.26 | 51.40 | 0.37 |
| vesicaria | | | (SEQ ID NO: 109) | (SEQ ID NO: 132) | | | | |
| | | PAC: 39898490 | Eruve.0510s0014 | Eruve.0510s0014.1 | 0 | 510.76 | 50.09 | 0.37 |
| | | | (SEQ ID NO: 110) | (SEQ ID NO: 133) | | | | |
| Glycine max | soybean | 102669506 | LOC102669506 | XM_006585882.4 | 0 | 592.81 | 50.56 | 0.8 |
| | | | (SEQ ID NO: 111) | (SEQ ID NO: 134) | | | | |
| Helianthus | sunflower | 110922025 | LOC110922025 | XM_022166353.2 | 0 | 661.37 | 52.75 | 0.31 |
| annuus | | | (SEQ ID NO: 112) | (SEQ ID NO: 135) | | | | |
| Humulus | common hop | FID: 1178471116 | (SEQ ID NO: 113) | HL.Tea.v1.0.G034437.1 | 7.15E−03 | 38.12 | 20.77 | 0.00 |
| lupulus var. | | | | (SEQ ID NO: 136) | | | | |
| lupulus | | | | | | | | |
| Lactuca | lettuce | 111896741 | LOC111896741 | XM_023892727.1 | 7.21E−143 | 431.80 | 51.77 | 0.44 |
| sativa | | | (SEQ ID NO: 114) | (SEQ ID NO: 137) | | | | |
| Nicotiana | tobacco | 107813009 | LOC107813009 | XM_016638208.1 | 0 | 652.51 | 51.23 | 0.46 |
| tabacum | | | (SEQ ID NO: 115) | (SEQ ID NO: 138) | | | | |
| Ocimum | basil | FID: 3233400634 | 381471.97 | 381471.g7.t1 | 7.76E−171 | 513.46 | 49.19 | 1.62 |
| basilicum | | | (SEQ ID NO: 116) | (SEQ ID NO: 139) | | | | |
| var. | | | | | | | | |
| Genoveser | | | | | | | | |
| Phaseolus | common bean | 18634050 | PHAVU_003G061700g | XM_007153685.1 | 0 | 598.59 | 50.40 | 0.65 |
| vulgaris | | | (SEQ ID NO: 117) | (SEQ ID NO: 140) | | | | |
| Solanum | tomato | 109120124 | LOC109120124 | XM_019213519.2 | 3.35E−133 | 403.29 | 55.17 | 0 |
| lycopersicum | | | (SEQ ID NO: 118) | (SEQ ID NO: 141) | | | | |
| Solanum | potato | 102606213 | LOC102606213 | XM_006350212.2 | 0 | 621.70 | 51.95 | 0 |
| tuberosum | | | (SEQ ID NO: 119) | (SEQ ID NO: 142) | | | | |
| Vitis | grape | 109122670 | LOC109122670 | XM_019220132.1 | 0 | 690.65 | 57.37 | 0 |
| vinifera | | | (SEQ ID NO: 120) | (SEQ ID NO: 143) | | | | |
| Zea mays | maize | 100282858 | LOC100282858 | NM_001155764.1 | 8.88E−136 | 428.33 | 41.84 | 1.22 |
| | | | (SEQ ID NO: 121) | (SEQ ID NO: 144) | | | | |

TABLE 4

| Organism | Common name | Gene ID | Locus | Transcript ID | E-value | Bit score | % Identity | % Gaps |
|---|---|---|---|---|---|---|---|---|
| Spinacia | spinach | PAC: 45135072 | Spov3_chr4.04649 | (SEQ ID NO: 173) | | | 100.00 | |
| oleracea | | | (SEQ ID NO: 172) | | | | | |
| Beta | beet, swiss | 104908660 | LOC104908660 | XM_010697794.2 | 0 | 969.92 | 78.80 | 5 |
| vulgaris | chard | | (SEQ ID NO: 175) | (SEQ ID NO: 197) | | | | |
| subsp. | | | | | | | | |
| vulgaris | | | | | | | | |
| Brassica | rapeseed | 106409344 | LOC106409344 | XM_022706436.1 | 6.61E−58 | 222.25 | 47.2 | 11.71 |
| napus | | | (SEQ ID NO: 176) | (SEQ ID NO: 198) | | | | |
| Brassica | wild cabbage | 106306990 | LOC106306990 | XM_013743817.1 | 0 | 226.87 | 47.61 | 11.41 |
| oleracea | | | (SEQ ID NO: 177) | (SEQ ID NO: 199) | | | | |
| var. | | | | | | | | |
| oleracea | | | | | | | | |
| Capsicum | pepper | 107840907 | LOC107840907 | XM_016684857.1 | 5.94E−84 | 295.82 | 50.42 | 11.52 |
| annuum | | | (SEQ ID NO: 178) | (SEQ ID NO: 200) | | | | |
| Chenopodium | quinoa | 110726726 | LOC110726726 | XM_021906204.1 | 0 | 949.12 | 75.8 | 5.43 |
| quinoa | | | (SEQ ID NO: 179) | (SEQ ID NO: 201) | | | | |
| Citrullus | watermelon | na | Cla97C11G216720 | Cla97C11G216720.1 | 2.96E−31 | 132.88 | 25.4 | 13.74 |
| lanatus | | | (SEQ ID NO: 180) | (SEQ ID NO: 202) | | | | |
| Cucurbita | winter | 111492444 | LOC111492444 | XM_023141784.1 | 3.62E−47 | 189.5 | 47 | 14 |
| maxima | squash | | (SEQ ID NO: 183) | (SEQ ID NO: 205) | | | | |
| Cucumis | melon | na | MELO3C008693 | MELO3C008693.2.1 | 1.27E−95 | 144.05 | 26.81 | 13.47 |
| melo | | | (SEQ ID NO: 181) | (SEQ ID NO: 203) | | | | |
| Cucurbita | summer | Cp4.1LG16 | Cp4.1LG16g01740 | Cp4.1LG16g01740.1 | 1.30E−30 | 189.5 | 47 | 14 |
| pepo | squash, | | (SEQ ID NO: 184) | (SEQ ID NO: 206) | | | | |
| | zucchini | | | | | | | |
| Cucumis | cucumber | na | CsGy2G008360 | CsGy2G008360.1 | 1.71E−33 | 140.2 | 26.5 | 10.16 |
| sativus | | | (SEQ ID NO: 182) | (SEQ ID NO: 204) | | | | |
| Daucus | carrot | 108222647 | LOC108222647 | XM_017396535.1 | 0 | 202.22 | 46.30 | 13.55 |
| carota | | | (SEQ ID NO: 186) | (SEQ ID NO: 208) | | | | |
| subsp. | | | | | | | | |
| sativus | | | | | | | | |
| Eruca | rocket | PAC: 39900680 | Eruve.2647s0012 | Eruve.2647s0012.1 | 0.02 | 38.51 | 26.05 | 9.24 |
| vesicaria | | | (SEQ ID NO: 187) | (SEQ ID NO: 209) | | | | |
| Glycine | soybean | 114378323 | LOC114378323 | XM_028336895.1 | 1.98E−83 | 294.66 | 50.36 | 16.07 |
| max | | | (SEQ ID NO: 188) | (SEQ ID NO: 210) | | | | |
| Helianthus | sunflower | 110888041 | LOC110888041 | XM_022135586.1 | 4.14E−46 | 186.42 | 46.5 | 8.88 |
| annuus | | | (SEQ ID NO: 189) | (SEQ ID NO: 211) | | | | |
| Lactuca | lettuce | 111884527 | LOC111884527 | XM_023880841.1 | 2.41E−90 | 313.15 | 53.21 | 10.74 |
| sativa | | | (SEQ ID NO: 190) | (SEQ ID NO: 212) | | | | |
| Nicotiana | tobacco | 107783800 | LOC107783800 | XM_016604819.1 | 3.06E−82 | 289.66 | 52.15 | 12.17 |
| tabacum | | | (SEQ ID NO: 191) | (SEQ ID NO: 213) | | | | |
| Ocimum | basil | FID: 3233781621 | 544.g114 | 544.g114.t1 | 5.19E−95 | 317.77 | 31.68 | 8.78 |
| basilicum | | | (SEQ ID NO: 192) | (SEQ ID NO: 214) | | | | |
| var. | | | | | | | | |
| Genoveser | | | | | | | | |
| Phaseolus | common | 18630497 | PHAVU_005G087100g | XM_007149584.1 | 4.76E−83 | 293.89 | 48.99 | 16.61 |
| vulgaris | bean | | (SEQ ID NO: 193) | (SEQ ID NO: 215) | | | | |
| Solanum | tomato | 101244633 | LOC101244633 | XM_004249666.4 | 1.52E−85 | 300.83 | 50.12 | 14.85 |
| lycopersicum | | | (SEQ ID NO: 185) | (SEQ ID NO: 207) | | | | |
| Solanum | potato | 102583217 | LOC102583217 | XM_015310721.1 | 7.37E−73 | 264.62 | 48.9 | 9.81 |
| tuberosum | | | (SEQ ID NO: 194) | (SEQ ID NO: 216) | | | | |
| Vitis | grape | 100258875 | LOC100258875 | XM_002283378.3 | 1.17E−94 | 325.87 | 51.35 | 12.61 |
| vinifera | | | (SEQ ID NO: 195) | (SEQ ID NO: 217) | | | | |
| Zea mays | maize | 103651126 | LOC103651126 | XM_008676725.3 | 5.47E−47 | 188.73 | 46.88 | 14 |
| | | | (SEQ ID NO: 196) | (SEQ ID NO: 218) | | | | |

TABLE 5

| Candidate Gene | Gene model | Identity % | Position | Genomic | cDNA | Protein |
|---|---|---|---|---|---|---|
| | Sunflower (XRQ2) | | | | | |
| Sp75 Spo10764 | HanXRQr2_Chr17g0787021 | 52.7 | HanXRQChr17: 15291060 . . . 15293054 | SEQ ID | SEQ ID | SEQ ID |
| | | | | NO: 317 | NO: 322 | NO: 327 |
| Spov3_chr4.04752 | HanXRQr2_Chr12g0544841 | 93 | HanXRQChr12: 61292169 . . . 61300151 | SEQ ID | SEQ ID | SEQ ID |
| | | | | NO: 258 | NO: 278 | NO: 300 |
| Spov3_chr4.04752 | HanXRQr2_Chr12g0563761 | 90 | HanXRQChr12: 158512420 . . . 158519768 | SEQ ID | SEQ ID | SEQ ID |
| | | | | NO: 259 | NO: 279 | NO: 301 |
| Spov3_chr4.04752 | HanXRQr2_Chr02g0051381 | 77 | HanXRQChr02: 21014549 . . . 21018351 | SEQ ID | SEQ ID | SEQ ID |
| | | | | NO: 260 | NO: 280 | NO: 302 |
| | Sorghum (BTx623v3) | | | | | |
| Sp75 Spo10764 | Sobic.010G255800.2 | 41% | Chr10: 59424506 . . . 59427930 | SEQ ID | SEQ ID | SEQ ID |
| | | | | NO: 318 | NO: 323 | NO: 328 |
| Spov3_chr4.04752 | Sobic.003G270600.1 | 90.20% | Chr03: 60727143 . . . 60735273 | SEQ ID | SEQ ID | SEQ ID |
| | | | | NO: 261 | NO: 281 | NO: 303 |
| | Rapeseed (Darmorv10) | | | | | |
| Sp75 Spo10764 | A03p36200.1_BnaDAR-T1 | 33.10% | A03: 16562227 . . . 16565322 | SEQ ID | SEQ ID | SEQ ID |
| | | | | NO: 319 | NO: 324 | NO: 329 |
| Spov3_chr4.04752 | A09p64610.1_BnaDAR-T1 | 90.70% | A09: 51206504 . . . 51209206 | SEQ ID | SEQ ID | SEQ ID |
| | | | | NO: 262 | NO: 282 | NO: 304 |
| Spov3_chr4.04752 | C08p48590.1_BnaDAR-T1 | 90.40% | C08: 38839812 . . . 38842948 | SEQ ID | SEQ ID | SEQ ID |
| | | | | NO: 263 | NO: 283 | NO: 305 |
| Spov3_chr4.04752 | C05p09110.1_BnaDAR-T1 | 90.20% | C05: 4627469 . . . 4630182 | SEQ ID | SEQ ID | SEQ ID |
| | | | | NO: 264 | NO: 284 | NO: 306 |
| Spov3_chr4.04752 | A01p29530.1_BnaDAR-T1 | 90.40% | A01: 20492291 . . . 20495341 | SEQ ID | SEQ ID | SEQ ID |
| | | | | NO: 265 | NO: 285 | NO: 307 |
| Spov3_chr4.04752 | A06p07560.1_BnaDAR-T1 | 90% | A06: 4237812 . . . 4240747 | SEQ ID | SEQ ID | SEQ ID |
| | | | | NO: 266 | NO: 286 | NO: 308 |
| Spov3_chr4.04752 | C01p37360.1_BnaDAR-T1 | 89.70% | C01: 32908478 . . . 32911143 | SEQ ID | SEQ ID | SEQ ID |
| | | | | NO: 267 | NO: 287 | NO: 309 |
| | Maize (B73 AGPv4) | | | | | |
| Spov3_chr4.04752 | Zm00001d043726_T006 | 90.20% | chr3: 208445923 . . . 208450685 | SEQ ID | SEQ ID | SEQ ID |
| | | | | NO: 268 | NO: 288 | NO: 310 |
| Spov3_chr4.04752 | Zm00001d043726_T001 | 90.20% | chr3: 208445923 . . . 208450685 | SEQ ID | SEQ ID | SEQ ID |
| | | | | NO: 268 | NO: 289 | NO: 311 |
| Spov3_chr4.04752 | Zm00001d043726_T002 | 87.40% | chr3: 208445923 . . . 208450685 | SEQ ID | SEQ ID | SEQ ID |
| | | | | NO: 268 | NO: 290 | NO: 312 |
| Spov3_chr4.04752 | Zm00001d011676_T002 | 77.30% | chr8: 158309275 . . . 158313766 | SEQ ID | SEQ ID | SEQ ID |
| | | | | NO: 269 | NO: 291 | NO: 313 |
| Spov3_chr4.04752 | Zm00001d011676_T001 | 77.30% | chr8: 158309275 . . . 158313766 | SEQ ID | SEQ ID | SEQ ID |
| | | | | NO: 269 | NO: 292 | NO: 314 |

TABLE 6

| Candidate Gene | Organism | Gene Model | Genomic | cDNA | Protein |
|---|---|---|---|---|---|
| Spov3_chr4.04752 | Beet, Swiss chard | Bv6_148070_ijzy.t1 | SEQ ID NO: 270 | SEQ ID NO: 293 | SEQ ID NO: 315 |
| | (Beta vulgaris) | | | | |
| Sp75 Spo10764 | | Bv6_148650_nahx.t1 | SEQ ID NO: 320 | SEQ ID NO: 325 | SEQ ID NO: 330 |
| Spov3_chr4.04649 | | Bv7_177740_zcug.t1 | SEQ ID NO: 331 | SEQ ID NO: 332 | SEQ ID NO: 333 |

### Altering the Activity of a Protein Encoded by an S-Gene

[0148] In certain embodiments the invention may include modulation of the S-gene to alter, induce, reduce, or eliminate the activity of a protein encoded by an S-gene, perhaps during certain developmental stages or tissues etc., by transforming a plant cell with an expression cassette that expresses a polynucleotide that alters the expression of the protein. The polynucleotide may alter the expression of the protein directly, by influencing transcription or translation of the messenger RNA, or indirectly, by encoding a polypeptide that induces, reduces, or inhibits transcription or translation. Methods for altering, inducing, reducing, inhibiting or eliminating the expression of a gene in a plant are well known in the art, and any such method may be used in the present invention to alter the expression of a protein encoded by an S-gene. Many methods may be used to reduce or eliminate or otherwise alter the activity of a protein encoded by an S-gene. In addition, more than one method may be used to alter the activity of a protein encoded by an S-gene.

### 1. Polynucleotide-Based Methods:

[0149] In some embodiments of the present invention, a plant is transformed with an expression cassette that is capable of expressing a polynucleotide that inhibits the expression of a protein encoded by an S-gene of the invention. The term “expression” as used herein refers to the biosynthesis of a gene product, including the transcription and/or translation of said gene product. For example, for the purposes of the present invention, an expression cassette capable of expressing a polynucleotide that inhibits the expression of at least one protein encoded by an S-gene is an expression cassette capable of producing an RNA molecule that inhibits the transcription and/or translation of at least one protein encoded by an S-gene of the invention. The “expression” or “production” of a protein or polypeptide from a DNA molecule refers to the transcription and translation of the coding sequence to produce the protein or polypeptide, while the “expression” or “production” of a protein or polypeptide from an RNA molecule refers to the translation of the RNA coding sequence to produce the protein or polypeptide.

[0150] Examples of polynucleotides that inhibit the expression of a protein encoded by an S-gene are given below.

i. Sense Suppression/Cosuppression

[0151] In some embodiments of the invention, inhibition of the expression of a protein encoded by an S-gene may be obtained by sense suppression or cosuppression. For cosuppression, an expression cassette is designed to express an RNA molecule corresponding to all or part of a messenger RNA encoding a protein in the “sense” orientation. Over expression of the RNA molecule can result in reduced expression of the native gene. Accordingly, multiple plant lines transformed with the cosuppression expression cassette are screened to identify those that show the greatest inhibition of protein expression.

[0152] The polynucleotide used for cosuppression may correspond to all or part of the sequence encoding the protein, all or part of the 5′ and/or 3′ untranslated region of a transcript, or all or part of both the coding sequence and the untranslated regions of a transcript encoding a protein. In some embodiments where the polynucleotide comprises all or part of the coding region for the protein, the expression cassette is designed to eliminate the start codon of the polynucleotide so that no protein product will be translated.

[0153] Cosuppression may be used to inhibit the expression of plant genes to produce plants having undetectable protein levels for the proteins encoded by these genes. See, for example, Broin, et al., (2002) Plant Cell 14:1417-1432. Cosuppression may also be used to inhibit the expression of multiple proteins in the same plant. See, for example, U.S. Pat. No. 5,942,657. Methods for using cosuppression to inhibit the expression of endogenous genes in plants are described in Flavell, et al., (1994) Proc. Natl. Acad. Sci. USA 91:3490-3496; Jorgensen, et al., (1996) Plant Mol. Biol. 31:957-973; Johansen and Carrington, (2001) Plant Physiol. 126:930-938; Broin, et al., (2002) Plant Cell 14:1417-1432; Stoutjesdijk, et al., (2002) Plant Physiol. 129:1723-1731; Yu, et al., (2003) Phytochemistry 63:753-763; and U.S. Pat. Nos. 5,034,323, 5,283,184, and 5,942,657. The efficiency of cosuppression may be increased by including a poly-dT region in the expression cassette at a position 3′ to the sense sequence and 5′ of the polyadenylation signal. See, U.S. Patent Publication No. 20020048814. Typically, such a nucleotide sequence has substantial sequence identity to the sequence of the transcript of the endogenous gene, optimally greater than about 65% sequence identity, more optimally greater than about 85% sequence identity, most optimally greater than about 95% sequence identity. See U.S. Pat. Nos. 5,283,184 and 5,034,323.

ii. Antisense Suppression

[0154] In some embodiments of the invention, inhibition of the expression of a protein encoded by an S-gene may be obtained by antisense suppression. For antisense suppression, the expression cassette is designed to express an RNA molecule complementary to all or part of a messenger RNA encoding the protein. Over expression of the antisense RNA molecule can result in reduced expression of the native gene. Accordingly, multiple plant lines transformed with the antisense suppression expression cassette are screened to identify those that show the greatest inhibition of protein expression.

[0155] The polynucleotide for use in antisense suppression may correspond to all or part of the complement of the sequence encoding the protein, all or part of the complement of the 5′ and/or 3′ untranslated region of the transcript, or all or part of the complement of both the coding sequence and the untranslated regions of a transcript encoding the protein. In addition, the antisense polynucleotide may be fully complementary (i.e., 100% identical to the complement of the target sequence) or partially complementary (i.e., less than 100% identical to the complement of the target sequence) to the target sequence. Antisense suppression may be used to inhibit the expression of multiple proteins in the same plant. See, for example, U.S. Pat. No. 5,942,657. Furthermore, portions of the antisense nucleotides may be used to disrupt the expression of the target gene. Generally, sequences of at least 50 nucleotides, 100 nucleotides, 200 nucleotides, 300, 400, 450, 500, 550, or greater may be used. Methods for using antisense suppression to inhibit the expression of endogenous genes in plants are described, for example, in Liu, et al., (2002) Plant Physiol. 129:1732-1743 and U.S. Pat. Nos. 5,759,829 and 5,942,657. Efficiency of antisense suppression may be increased by including a poly-dT region in the expression cassette at a position 3′ to the antisense sequence and 5′ of the polyadenylation signal. See, U.S. Patent Publication No. 20020048814.

iii. Double-Stranded RNA Interference

[0156] In some embodiments of the invention, inhibition of the expression of a protein encoded by an S-gene may be obtained by double-stranded RNA (dsRNA) interference. For dsRNA interference, a sense RNA molecule like that described above for cosuppression and an antisense RNA molecule that is fully or partially complementary to the sense RNA molecule are expressed in the same cell, resulting in inhibition of the expression of the corresponding endogenous messenger RNA.

[0157] Expression of the sense and antisense molecules can be accomplished by designing the expression cassette to comprise both a sense sequence and an antisense sequence. Alternatively, separate expression cassettes may be used for the sense and antisense sequences. Multiple plant lines transformed with the dsRNA interference expression cassette or expression cassettes are then screened to identify plant lines that show the greatest inhibition of protein expression. Methods for using dsRNA interference to inhibit the expression of endogenous plant genes are described in Waterhouse, et al., (1998) Proc. Natl. Acad. Sci. USA 95:13959-13964, Liu, et al., (2002) Plant Physiol. 129:1732-1743, and WO 99/49029, WO 99/53050, WO 99/61631, and WO 00/49035.

iv. Hairpin RNA Interference and Intron-Containing Hairpin RNA Interference

[0158] In some embodiments of the invention, inhibition of the expression of a protein encoded by an S-gene may be obtained by hairpin RNA (hpRNA) interference or intron-containing hairpin RNA (ihpRNA) interference. These methods are highly efficient at inhibiting the expression of endogenous genes. See, Waterhouse and Helliwell, (2003) Nat. Rev. Genet. 4:29-38 and the references cited therein.

[0159] For hpRNA interference, the expression cassette is designed to express an RNA molecule that hybridizes with itself to form a hairpin structure that comprises a single-stranded loop region and a base-paired stem. The base-paired stem region comprises a sense sequence corresponding to all or part of the endogenous messenger RNA encoding the gene whose expression is to be inhibited, and an antisense sequence that is fully or partially complementary to the sense sequence. Alternatively, the base-paired stem region may correspond to a portion of a promoter sequence controlling expression of the gene to be inhibited. Thus, the base-paired stem region of the molecule generally determines the specificity of the RNA interference. hpRNA molecules are highly efficient at inhibiting the expression of endogenous genes, and the RNA interference they induce is inherited by subsequent generations of plants. See, for example, Chuang and Meyerowitz, (2000) Proc. Natl. Acad. Sci. USA 97:4985-4990; Stoutjesdijk, et al., (2002) Plant Physiol. 129:1723-1731; and Waterhouse and Helliwell, (2003) Nat. Rev. Genet. 4:29-38. Methods for using hpRNA interference to inhibit or silence the expression of genes are described, for example, in Chuang and Meyerowitz, (2000) Proc. Natl. Acad. Sci. USA 97:4985-4990; Stoutjesdijk, et al., (2002) Plant Physiol. 129:1723-1731; Waterhouse and Helliwell, (2003) Nat. Rev. Genet. 4:29-38; Pandolfini et al., BMC Biotechnology 3:7, and U.S. Patent Publication No. 2003/0175965. A transient assay for the efficiency of hpRNA constructs to silence gene expression in vivo has been described by Panstruga, et al., (2003) Mol. Biol. Rep. 30:135-140.

[0160] For ihpRNA, the interfering molecules have the same general structure as for hpRNA, but the RNA molecule additionally comprises an intron that is capable of being spliced in the cell in which the ihpRNA is expressed. The use of an intron minimizes the size of the loop in the hairpin RNA molecule following splicing, and this increases the efficiency of interference. See, for example, Smith, et al., (2000) Nature 407:319-320. In fact, Smith, et al., show 100% suppression of endogenous gene expression using ihpRNA-mediated interference. Methods for using ihpRNA interference to inhibit the expression of endogenous plant genes are described, for example, in Smith, et al., (2000) Nature 407:319-320; Wesley, et al., (2001) Plant J. 27:581-590; Wang and Waterhouse, (2001) Curr. Opin. Plant Biol. 5:146-150; Waterhouse and Helliwell, (2003) Nat. Rev. Genet. 4:29-38; Helliwell and Waterhouse, (2003) Methods 30:289-295, and U.S. Patent Publication No. 2003/0180945.

[0161] The expression cassette for hpRNA interference may also be designed such that the sense sequence and the antisense sequence do not correspond to an endogenous RNA. In this embodiment, the sense and antisense sequence flank a loop sequence that comprises a nucleotide sequence corresponding to all or part of the endogenous messenger RNA of the target gene. Thus, it is the loop region that determines the specificity of the RNA interference. See, for example, WO 02/00904; Mette, et al., (2000) EMBO J 19:5194-5201; Matzke, et al., (2001) Curr. Opin. Genet. Devel. 11:221-227; Scheid, et al., (2002) Proc. Natl. Acad. Sci., USA 99:13659-13662; Aufsaftz, et al., (2002) Proc. Nat'l. Acad. Sci. 99 (4): 16499-16506; Sijen, et al., Curr. Biol. (2001) 11:436-440).

v. Amplicon-Mediated Interference

[0162] Amplicon expression cassettes comprise a plant virus-derived sequence that contains all or part of the target gene but generally not all of the genes of the native virus. The viral sequences present in the transcription product of the expression cassette allow the transcription product to direct its own replication. The transcripts produced by the amplicon may be either sense or antisense relative to the target sequence (i.e., the messenger RNA). Methods of using amplicons to inhibit the expression of endogenous plant genes are described, for example, in Angell and Baulcombe, (1997) EMBO J. 16:3675-3684, Angell and Baulcombe, (1999) Plant J. 20:357-362, and U.S. Pat. No. 6,635,805.

vi. Ribozymes

[0163] In some embodiments, the polynucleotide expressed by the expression cassette of the invention is catalytic RNA or has ribozyme activity specific for the messenger RNA of the protein. Thus, the polynucleotide causes the degradation of the endogenous messenger RNA, resulting in reduced expression of a protein encoded by an S-gene. This method is described, for example, in U.S. Pat. No. 4,987,071.

vii. Small Interfering RNA or Micro RNA

[0164] In some embodiments of the invention, inhibition of the expression a protein encoded by an S-gene may be obtained by RNA interference by expression of a gene encoding a micro RNA (miRNA). miRNAs are regulatory agents consisting of about 22 ribonucleotides. miRNA are highly efficient at inhibiting the expression of endogenous genes. See, for example Javier, et al., (2003) Nature 425:257-263.

[0165] For miRNA interference, the expression cassette is designed to express an RNA molecule that is modeled on an endogenous miRNA gene. The miRNA gene encodes an RNA that forms a hairpin structure containing a 22-nucleotide sequence that is complementary to another endogenous gene (target sequence). For suppression of S-gene expression, the 22-nucleotide sequence is selected from a transcript sequence and contains 22 nucleotides of said sequence in sense orientation and 21 nucleotides of a corresponding antisense sequence that is complementary to the sense sequence. miRNA molecules are highly efficient at inhibiting the expression of endogenous genes, and the RNA interference they induce is inherited by subsequent generations of plants.

### 2. Polypeptide-Based Inhibition of Gene Expression

[0166] In one embodiment, the polynucleotide encodes a zinc finger protein that binds to an S-gene encoding a polypeptide, resulting in reduced expression of the S-gene. In particular embodiments, the zinc finger protein binds to a regulatory region of an S-gene. In other embodiments, the zinc finger protein binds to a messenger RNA encoding a polypeptide and prevents its translation. Methods of selecting sites for targeting by zinc finger proteins have been described, for example, in U.S. Pat. No. 6,453,242, and methods for using zinc finger proteins to inhibit the expression of genes in plants are described, for example, in U.S. Patent Publication No. 2003/0037355.

### 3. Polypeptide-Based Inhibition of Protein Activity

[0167] In some embodiments of the invention, the polynucleotide encodes an antibody that binds to at least one polypeptide encoded by an S-gene, and reduces the activity of the polypeptide. In another embodiment, the binding of the antibody results in increased turnover of the antibody-polypeptide complex by cellular quality control mechanisms. The expression of antibodies in plant cells and the inhibition of molecular pathways by expression and binding of antibodies to proteins in plant cells are well known in the art. See, for example, Conrad and Sonnewald, (2003) Nature Biotech. 21:35-36.

### 4. Gene Disruption

[0168] In some embodiments of the present invention, the activity of a polypeptide encoded by an S-gene may be reduced or eliminated by disrupting the S-gene encoding the polypeptide. The S-gene encoding the polypeptide may be disrupted by any method known in the art. For example, in one embodiment, the gene is disrupted by transposon tagging. In another embodiment, the gene is disrupted by mutagenizing plants using random or targeted mutagenesis, and selecting for plants that have desired traits.

i. Transposon Tagging

[0169] In one embodiment of the invention, transposon tagging is used to reduce or eliminate the activity of one or more polypeptides encoded by an S-gene. Transposon tagging comprises inserting a transposon within an endogenous S-gene to reduce or eliminate expression of the polypeptide.

[0170] In this embodiment, the expression of one or more polypeptides encoded by an S-gene is reduced or eliminated by inserting a transposon within a regulatory region or coding region of the S-gene encoding the polypeptide. A transposon that is within an exon, intron, 5′ or 3′ untranslated sequence, a promoter, or any other regulatory sequence of an S-gene may be used to reduce or eliminate the expression and/or activity of the encoded polypeptide.

[0171] Methods for the transposon tagging of specific genes in plants are well known in the art. See, for example, Maes, et al., (1999) Trends Plant Sci. 4:90-96; Dharmapuri and Sonti, (1999) FEMS Microbiol. Lett. 179:53-59; Meissner, et al., (2000) Plant J. 22:265-274; Phogat, et al., (2000) J. Biosci. 25:57-63; Walbot, (2000) Curr. Opin. Plant Biol. 2:103-107; Gai, et al., (2000) Nucleic Acids Res. 28:94-96; Fitzmaurice, et al., (1999) Genetics 153:1919-1928). In addition, the TUSC process for selecting Mu insertions in selected genes has been described in Bensen, et al., (1995) Plant Cell 7:75-84; Mena, et al., (1996) Science 274:1537-1540; and U.S. Pat. No. 5,962,764.

ii. Mutant Plants with Reduced Activity

[0172] Additional methods for decreasing or eliminating the expression of endogenous genes in plants are also known in the art and can be similarly applied to the instant invention. These methods include other forms of mutagenesis, such as ethyl methanesulfonate-induced mutagenesis, deletion mutagenesis, and fast neutron deletion mutagenesis used in a reverse genetics sense (with PCR) to identify plant lines in which the endogenous gene has been deleted. For examples of these methods see, Ohshima, et al., (1998) Virology 243:472-481; Okubara, et al., (1994) Genetics 137:867-874; and Quesada, et al., (2000) Genetics 154:421-436. In addition, a fast and automatable method for screening for chemically induced mutations, TILLING (Targeting Induced Local Lesions In Genomes), using denaturing HPLC or selective endonuclease digestion of selected PCR products is also applicable to the instant invention. See, McCallum, et al., (2000) Nat. Biotechnol. 18:455-457.

[0173] Mutations that impact gene expression or that interfere with the function of the encoded protein are well known in the art. Insertional mutations in gene exons usually result in null-mutants. Mutations in conserved residues are particularly effective in inhibiting the activity of the encoded protein. Conserved residues of polypeptides suitable for mutagenesis with the goal to eliminate activity have been described. Such mutants can be isolated according to well-known procedures, and mutations in different loci can be stacked by genetic crossing. See, for example, Gruis, et al., (2002) Plant Cell 14:2863-2882.

[0174] In another embodiment of this invention, dominant mutants can be used to trigger RNA silencing due to gene inversion and recombination of a duplicated gene locus. See, for example, Kusaba, et al., (2003) Plant Cell 15:1455-1467.

[0175] The invention encompasses additional methods for altering (including reducing, inducing or eliminating) the activity of one or more polypeptides encoded by an S-gene. Examples of other methods for altering or mutating a genomic nucleotide sequence in a plant are known in the art and include, but are not limited to, the use of RNA: DNA vectors, RNA: DNA mutational vectors, RNA: DNA repair vectors, mixed-duplex oligonucleotides, self-complementary RNA: DNA oligonucleotides, and recombinogenic oligonucleobases. Such vectors and methods of use are known in the art. See, for example, U.S. Pat. Nos. 5,565,350; 5,731,181; 5,756,325; 5,760,012; 5,795,972; and 5,871,984. See also, WO 98/49350, WO 99/07865, WO 99/25821, and Beetham, et al., (1999) Proc. Natl. Acad. Sci. USA 96:8774-8778.

### Genome Editing and Induced Mutagenesis

[0176] In general, methods to modify or alter the host endogenous genomic DNA are available. This includes altering the host native DNA sequence or a pre-existing transgenic sequence including regulatory elements, coding and non-coding sequences. These methods are also useful in targeting nucleic acids to pre-engineered target recognition sequences in the genome. As an example, the genetically modified cell or plant described herein is generated using “custom” meganucleases produced to modify plant genomes (see, e.g., WO 2009/114321; Gao, et al., (2010) Plant Journal 1:176-187). Other site-directed engineering is through the use of zinc finger domain recognition coupled with the restriction properties of restriction enzyme. See, e.g., Urnov, et al., (2010) Nat Rev Genet. 11 (9): 636-46; Shukla, et al., (2009) Nature 459 (7245): 437-41.

[0177] “TILLING” or “Targeting Induced Local Lesions IN Genomics” refers to a mutagenesis technology useful to generate and/or identify and to eventually isolate mutagenised variants of a particular nucleic acid with modulated expression and/or activity (McCallum, et al., (2000), Plant Physiology 123:439-442; McCallum, et al., (2000) Nature Biotechnology 18:455-457 and Colbert, et al., (2001) Plant Physiology 126:480-484).

[0178] TILLING combines high density point mutations with rapid sensitive detection of the mutations. Typically, ethylmethanesulfonate (EMS) is used to mutagenize plant seed. EMS alkylates guanine, which typically leads to mispairing. For example, seeds are soaked in an about 10-20 mM solution of EMS for about 10 to 20 hours; the seeds are washed and then sown. The plants of this generation are known as M1. M1 plants are then self-fertilized. Mutations that are present in cells that form the reproductive tissues are inherited by the next generation (M2). Typically, M2 plants are screened for mutation in the desired gene and/or for specific phenotypes.

[0179] TILLING also allows selection of plants carrying mutant variants. These mutant variants may exhibit modified expression, either in strength or in location or in timing (if the mutations affect the promoter, for example). These mutant variants may exhibit higher or lower activity than that exhibited by the gene in its natural form. TILLING combines high-density mutagenesis with high-throughput screening methods. The steps typically followed in TILLING are: (a) EMS mutagenesis (Redei and Koncz, (1992) In Methods in Arabidopsis Research, Koncz, et al., eds. Singapore, World Scientific Publishing Co, pp. 16-82; Feldmann, et al., (1994) In Arabidopsis. Meyerowitz and Somerville, eds, Cold Spring Harbor Laboratory Press, Cold Spring Harbor, N.Y., pp 137-172; Lightner and Caspar, (1998) In Methods on Molecular Biology 82:91-104; Martinez-Zapater and Salinas, eds, Humana Press, Totowa, N.J.); (b) DNA preparation and pooling of individuals; (c) PCR amplification of a region of interest; (d) denaturation and annealing to allow formation of heteroduplexes; (e) DHPLC, where the presence of a heteroduplex in a pool is detected as an extra peak in the chromatogram; (f) identification of the mutant individual; and (g) sequencing of the mutant PCR product. Methods for TILLING are well known in the art (U.S. Pat. No. 8,071,840).

[0180] Other mutagenic methods can also be employed to introduce mutations in a disclosed gene. Methods for introducing genetic mutations into plant genes and selecting plants with desired traits are well known. For instance, seeds or other plant material can be treated with a mutagenic chemical substance, according to standard techniques. Such chemical substances include, but are not limited to, the following: diethyl sulfate, ethylene imine, and N-nitroso-N-ethylurea. Alternatively, ionizing radiation from sources such as X-rays or gamma rays can be used.

[0181] Another genome editing method that can be used according to the various aspects of the invention is CRISPR. The use of this technology in genome editing is well described in the art, for example in U.S. Pat. No. 8,697,359 and references cited herein. In short, CRISPR is a microbial nuclease system involved in defense against invading phages and plasmids. CRISPR loci in microbial hosts contain a combination of CRISPR-associated (Cas) genes as well as non-coding RNA elements capable of programming the specificity of the CRISPR-mediated nucleic acid cleavage (sgRNA). Three types (1-111) of CRISPR systems have been identified across a wide range of bacterial hosts. One key feature of each CRISPR locus is the presence of an array of repetitive sequences (direct repeats) interspaced by short stretches of non-repetitive sequences (spacers). The non-coding CRISPR array is transcribed and cleaved within direct repeats into short crRNAs containing individual spacer sequences, which direct Cas nucleases to the target site (protospacer). The Type II CRISPR is one of the most well characterized systems and carries out targeted DNA double-strand break in four sequential steps. First, two non-coding RNA, the pre-crRNA array and tracrRNA, are transcribed from the CRISPR locus. Second, tracrRNA hybridizes to the repeat regions of the pre-crRNA and mediates the processing of pre-crRNA into mature crRNAs containing individual spacer sequences. Third, the mature crRNA: tracrRNA complex directs Cas9 to the target DNA via Watson-Crick base-pairing between the spacer on the crRNA and the protospacer on the target DNA next to the protospacer adjacent motif (PAM), an additional requirement for target recognition. Finally, Cas9 mediates cleavage of target DNA to create a double-stranded break within the protospacer.

[0182] Cas9 is thus the hallmark protein of the type II CRISPR-Cas system, and a large monomeric DNA nuclease guided to a DNA target sequence adjacent to the PAM (protospacer adjacent motif) sequence motif by a complex of two noncoding RNAS: CRIPSR RNA (crRNA) and trans-activating crRNA (tracrRNA). The Cas9 protein contains two nuclease domains homologous to RuvC and HNH nucleases. The HNH nuclease domain cleaves the complementary DNA strand whereas the RuvC-like domain cleaves the non-complementary strand and, as a result, a blunt cut is introduced in the target DNA. Heterologous expression of Cas9 together with an sgRNA can introduce site-specific double strand breaks (DSBs) into genomic DNA of live cells from various organisms. For applications in eukaryotic organisms, codon optimized versions of Cas9, which is originally from the bacterium Streptococcus pyogenes, have been used.

[0183] The single guide RNA (sgRNA) is the second component of the CRISPR/Cas system that forms a complex with the Cas9 nuclease. sgRNA is a synthetic RNA chimera created by fusing crRNA with tracrRNA. The sgRNA guide sequence located at its 5′ end confers DNA target specificity. Therefore, by modifying the guide sequence, it is possible to create sgRNAs with different target specificities. The canonical length of the guide sequence is 20 bp. In plants, sgRNAs have been expressed using plant RNA polymerase III promoters, such as U6 and U3. Cas9 expression plasmids for use in the methods of the invention can be constructed as described in the art. Alternatively, Cas9 (or Cas12A) can be transferred to plant tissues as active proteins.

### Nucleotide Constructs, Expression Cassettes, and Vectors

[0184] The use of the term “nucleotide constructs” herein is not intended to limit the embodiments to nucleotide constructs comprising DNA. Those of ordinary skill in the art that nucleotide constructs, particularly polynucleotides and will recognize oligonucleotides composed of ribonucleotides and combinations of ribonucleotides and deoxyribonucleotides, may also be employed in the methods disclosed herein. The nucleotide constructs, nucleic acids, and nucleotide sequences of the embodiments additionally encompass all complementary forms of such constructs, molecules, and sequences. Further, the nucleotide constructs, nucleotide molecules, and nucleotide sequences of the embodiments encompass all nucleotide constructs, molecules, and sequences which can be employed in the methods of the embodiments for transforming plants including, but not limited to, those comprised of deoxyribonucleotides, ribonucleotides, and combinations thereof. Such deoxyribonucleotides and ribonucleotides include both naturally occurring molecules and synthetic analogues. The nucleotide constructs, nucleic acids, and nucleotide sequences of the embodiments also encompass all forms of nucleotide constructs including, but not limited to, single-stranded forms, double-stranded forms, hairpins, stem-and-loop structures and the like.

[0185] A further embodiment relates to a transformed organism such as an organism selected from plant cells, bacteria, yeast, baculovirus, protozoa, nematodes and algae. The transformed organism comprises a DNA molecule of the embodiments, an expression cassette comprising the DNA molecule or a vector comprising the expression cassette, which may be stably incorporated into the genome of the transformed organism.

[0186] The sequences of the embodiments are provided in DNA constructs for expression in the organism of interest. The construct will include 5′ and 3′ regulatory sequences operably linked to a sequence of the embodiments. The term “operably linked” as used herein refers to a functional linkage between a promoter and/or a regulatory sequence and a second sequence, wherein the promoter and/or regulatory sequence initiates, mediates, and/or affects transcription of the DNA sequence corresponding to the second sequence. Generally, operably linked means that the nucleic acid sequences being linked are contiguous and where necessary to join two protein coding regions in the same reading frame. The construct may additionally contain at least one additional gene to be cotransformed into the organism. Alternatively, the additional gene(s) can be provided on multiple DNA constructs.

[0187] Such a DNA construct is provided with a plurality of restriction sites for insertion of the polypeptide gene sequence of the disclosure to be under the transcriptional regulation of the regulatory regions. The DNA construct may additionally contain selectable marker genes.

[0188] The DNA construct will generally include in the 5′ to 3′ direction of transcription: a transcriptional and translational initiation region (i.e., a promoter), a DNA sequence of the embodiments, and a transcriptional and translational termination region (i.e., termination region) functional in the organism serving as a host. The transcriptional initiation region (i.e., the promoter) may be native, analogous, foreign or heterologous to the host organism and/or to the sequence of the embodiments. Additionally, the promoter or regulatory sequence may be the natural sequence or alternatively a synthetic sequence. The term “foreign” as used herein indicates that the promoter is not found in the native organism into which the promoter is introduced. As used herein, the term “heterologous” in reference to a sequence means a sequence that originates from a foreign species or, if from the same species, is substantially modified from its native form in composition and/or genomic locus by deliberate human intervention. As used herein, a chimeric gene comprises a coding sequence operably linked to a transcription initiation region that is heterologous to the coding sequence. Where the promoter is a native or natural sequence, the expression of the operably linked sequence is altered from the wild-type expression, which results in an alteration in phenotype.

[0189] In some embodiments the DNA construct comprises an S-gene polynucleotide encoding a clathrin adaptor medium subunit polypeptide, a pentatricopeptide repeat-containing polypeptide, or an RPS2-like resistance polypeptide of the embodiments. In some embodiments the DNA construct comprises an S-gene polynucleotide encoding a fusion protein comprising a polypeptide of the embodiments.

[0190] In some embodiments the DNA construct may also include a transcriptional enhancer sequence. As used herein, the term an “enhancer” refers to a DNA sequence which can stimulate promoter activity, and may be an innate element of the promoter or a heterologous element inserted to enhance the level or tissue-specificity of a promoter. Various enhancers include, for example, introns with gene expression enhancing properties in plants (US Patent Application Publication Number 2009/0144863, the ubiquitin intron (i.e., the maize ubiquitin intron 1 (see, for example, NCBI sequence S94464)), the omega enhancer or the omega prime enhancer (Gallie, et al, (1989) Molecular Biology of RNA ed. Cech (Liss, New York) 237-256 and Gallie, el al, (1987) Gene 60:217-25), the CaMV 35S enhancer (see, e.g., Benfey, et al, (1990) EMBO J. 9:1685-96) and the enhancers of U.S. Pat. No. 7,803,992 may also be used. The above list of transcriptional enhancers is not meant to be limiting. Any appropriate transcriptional enhancer can be used in the embodiments.

[0191] The termination region may be native with the transcriptional initiation region, may be native with the operably linked DNA sequence of interest, may be native with the plant host or may be derived from another source (i.e., foreign or heterologous to the promoter, the sequence of interest, the plant host or any combination thereof).

[0192] Convenient termination regions are available from the Ti-plasmid of A. tumefaciens, such as the octopine synthase and nopaline synthase termination regions. See also, Guerineau, et al, (1991) Mol Gen. Genet. 262:141-144; Proudfoot, (1991) Cell 64:671-674; Sanfacon, et al, (1991) Genes Dev. 5:141-149; Mogen, et al, (1990) Plant Cell 2:1261-1272; Munroe, et al, (1990) Gene 91:151-158; Balias, et al, (1989) Nucleic Acids Res. 17:7891-7903 and Joshi, et al, (1987) Nucleic Acid Res. 15:9627-9639.

[0193] Where appropriate, a nucleic acid may be optimized for increased expression in the host organism. Thus, where the host organism is a plant, the synthetic nucleic acids can be synthesized using plant-preferred codons for improved expression. See, for example, Campbell and Gowri, (1990) Plant Physiol. 92:1-11 for a discussion of host-preferred usage. For example, although nucleic acid sequences of the embodiments may be expressed in both monocotyledonous and dicotyledonous plant species, sequences can be modified to account for the specific preferences and GC content preferences of monocotyledons or dicotyledons as these preferences have been shown to differ (Murray et al. (1989) Nucleic Acids Res. 17:477-498). Thus, the plant-preferred for a particular amino acid may be derived from known gene sequences from plants.

[0194] Additional sequence modifications are known to enhance gene expression in a cellular host. These include elimination of sequences encoding spurious polyadenylation signals, exon-intron splice site signals, transposon-like repeats, and other well-characterized sequences that may be deleterious to gene expression. The GC content of the sequence may be adjusted to levels average for a given cellular host, as calculated by reference to known genes expressed in the host cell. The term “host cell” as used herein refers to a cell which contains a vector and supports the replication and/or expression of the expression vector is intended. Host cells may be prokaryotic cells such as E. coli or eukaryotic cells such as yeast, insect, amphibian or mammalian cells or monocotyledonous or dicotyledonous plant cells. An example of a dicotyledonous host cell is a spinach host cell. When possible, the sequence is modified to avoid predicted hairpin secondary mRNA structures.

[0195] In preparing the expression cassette, the various DNA fragments may be manipulated so as to provide for the DNA sequences in the proper orientation and, as appropriate, in the proper reading frame. Toward this end, adapters or linkers may be employed to join the DNA fragments or other manipulations may be involved to provide for convenient restriction sites, removal of superfluous DNA, removal of restriction sites or the like. For this purpose, in vitro mutagenesis, primer repair, restriction, annealing, resubstitutions, e.g., transitions and transversions, may be involved.

[0196] A number of promoters can be used in the practice of the embodiments. The promoters can be selected based on the desired outcome. The nucleic acids can be combined with constitutive, tissue-preferred, inducible or other promoters for expression in the host organism.

### Plant Transformation

[0197] The methods of the embodiments involve introducing a polypeptide or polynucleotide into a plant. “Introducing” is as used herein means presenting to the plant the polynucleotide or polypeptide in such a manner that the sequence gains access to the interior of a cell of the plant. The methods of the embodiments do not depend on a particular method for introducing a polynucleotide or polypeptide into a plant, only that the polynucleotide(s) or polypeptide(s) gains access to the interior of at least one cell of the plant. Methods for introducing polynucleotide(s) or polypeptide(s) into plants include, but are not limited to, stable transformation methods, transient transformation methods, and virus-mediated methods.

[0198] “Stable transformation” as used herein means that the nucleotide construct introduced into a plant integrates into the genome of the plant and is capable of being inherited by the progeny thereof. “Transient transformation” as used herein means that a polynucleotide is introduced into the plant and does not integrate into the genome of the plant or a polypeptide is introduced into a plant.

[0199] Transformation protocols as well as protocols for introducing nucleotide sequences into plants may vary depending on the type of plant or plant cell, i.e., monocot or dicot, targeted for transformation. Suitable methods of introducing nucleotide sequences into plant cells and subsequent insertion into the plant genome include microinjection (Crossway, et al., (1986) Biotechniques 4:320-334), electroporation (Riggs, et al., (1986) Proc. Natl. Acad. Sci. USA 83:5602-5606), Agrobacterium-mediated transformation (U.S. Pat. Nos. 5,563,055 and 5,981,840), direct gene transfer (Paszkowski, et al., (1984) EMBO J. 3:2717-2722) and ballistic particle acceleration (see, for example, U.S. Pat. Nos. 4,945,050; 5,879,918; 5,886,244 and 5,932,782; Tomes, et al., (1995) in Plant Cell, Tissue, and Organ Culture: Fundamental Methods, ed. Gamborg and Phillips, (Springer-Verlag, Berlin) and McCabe, et al., (1988) Biotechnology 6:923-926) and Led transformation (WO 00/28058). For potato transformation see, Tu, et al., (1998) Plant Molecular Biology 37:829-838 and Chong, et al., (2000) Transgenic Research 9:71-78. Additional transformation procedures can be found in Weissinger, et al., (1988) Ann. Rev. Genet. 22:421-477; Sanford, et al., (1987) Particulate Science and Technology 5:27-37 (onion); Christou, et al., (1988) Plant Physiol. 87:671-674 (soybean); McCabe, et al., (1988) Bio/Technology 6:923-926 (soybean); Finer and McMullen, (1991) In Vitro Cell Dev. Biol. 27P: 175-182 (soybean); Singh, et al., (1998) Theor. Appl. Genet. 96:319-324 (soybean); Datta, et al., (1990) Biotechnology 8:736-740 (rice); Klein, et al., (1988) Proc. Natl. Acad. Sci. USA 85:4305-4309 (maize); Klein, et al., (1988) Biotechnology 6:559-563 (maize); U.S. Pat. Nos. 5,240,855; 5,322,783 and 5,324,646; Klein, et al., (1988) Plant Physiol. 91:440-444 (maize); Fromm, et al., (1990) Biotechnology 8:833-839 (maize); Hooykaas-Van Slogteren, et al., (1984) Nature (London) 311:763-764; U.S. Pat. No. 5,736,369 (cereals); Bytebier, et al., (1987) Proc. Natl. Acad. Sci. USA 84:5345-5349 (Liliaceae); De Wet, et al., (1985) in The Experimental Manipulation of Ovule Tissues, ed. Chapman, et al., (Longman, New York), pp. 197-209 (pollen); Kaeppler, et al., (1990) Plant Cell Reports 9:415-418 and Kaeppler, et al., (1992) Theor. Appl. Genet. 84:560-566 (whisker-mediated transformation); D'Halluin, et al., (1992) Plant Cell 4:1495-1505 (electroporation); Li, et al., (1993) Plant Cell Reports 12:250-255 and Christou and Ford, (1995) Annals of Botany 75:407-413 (rice); Osjoda, et al., (1996) Nature Biotechnology 14:745-750 (maize via Agrobacterium tumefaciens).

Methods to Introduce Genome Editing Technologies into Plants

[0200] In some embodiments, polynucleotide compositions can be introduced into the genome of a plant using genome editing technologies, or endogenous polynucleotides in the genome of a plant may be edited using genome editing technologies. For example, the identified polynucleotides can be introduced into a desired location in the genome of a plant through the use of double-stranded break technologies such as TALENS, meganucleases, zinc finger nucleases, CRISPR-Cas, and the like.

[0201] In some embodiments, where an S-gene has been identified in a genome, genome editing technologies may be used to alter or modify the polynucleotide sequence. Site specific modifications that can be introduced into the desired gene allele polynucleotide include those produced using any method for introducing site specific modification, including, but not limited to, through the use of gene repair oligonucleotides (e.g. US Publication 2013/0019349), or through the use of double-stranded break technologies such as TALENs, meganucleases, zinc finger nucleases, CRISPR-Cas, and the like. Such technologies can be used to modify the polynucleotide through the insertion, deletion or substitution of nucleotides within the polynucleotide. Alternatively, double-stranded break technologies can be used to add additional nucleotide sequences to the polynucleotide. Additional sequences that may be added include, additional expression elements, such as enhancer and promoter sequences. In another embodiment, genome editing technologies may be used to position additional disease resistant proteins in close proximity to the S-gene polynucleotide within the genome of a plant, in order to generate molecular stacks of disease resistant proteins. An “altered target site,” “altered target sequence,” “modified target site,” and “modified target sequence” are used interchangeably herein and refer to a target sequence as disclosed herein that comprises at least one alteration when compared to non-altered target sequence. Such “alterations” include, for example: (i) replacement of at least one nucleotide (substitution, such as an GC to AT transition or such as a G to C or A to T transversion), (ii) a deletion of at least one nucleotide, (iii) an insertion of at least one nucleotide, or (iv) any combination of (i)-(iii).

### Embodiments

[0202] The following numbered embodiments also form part of the present disclosure:

[0203] 1. A method of reducing susceptibility to a pathogen in a plant, the method comprising: introducing one or more nucleotide modifications at a genomic locus of the plant, wherein the genomic locus comprises a susceptibility gene (S-gene) encoding a clathrin adaptor medium subunit protein, a pentatricopeptide repeat-containing family protein, or an RPS2-like resistance protein.

[0204] 2. The method of embodiment 1, wherein the one or more nucleotide modifications comprise a plurality of transitions such as GC to AT, transversions such as G to C or A to T, insertions, deletions, or a combination thereof in the S-gene.

[0205] 3. The method of embodiment 1 or embodiment 2, wherein the one or more nucleotide modifications are introduced by a mutagen.

[0206] 4. The method of embodiment 3, wherein the mutagen is ethyl methyl sulfonate (EMS).

[0207] 5. The method of embodiment 1 or embodiment 2, wherein the one or more nucleotide modifications are introduced through a targeted DNA modification.

[0208] 6. The method of embodiment 5, wherein the targeted DNA modification is introduced by an RNA-guided endonuclease.

[0209] 7. The method of embodiment 1 or embodiment 2, wherein the one or more nucleotide modifications are introduced by introgression.

[0210] 8. The method of any one of embodiments 1-7, wherein the one or more nucleotide modifications result in altered expression or activity of a protein encoded by the S-gene.

[0211] 9. The method of any one of embodiments 1-8, wherein the one or more nucleotide modifications comprises an insertion, a deletion, or a single nucleotide polymorphism (SNP).

[0212] 10. The method of any one of embodiments 1-9, wherein the one or more nucleotide modifications comprise at least one non-synonymous single nucleotide polymorphism (nsSNP) in the S-gene coding sequence.

[0213] 11. The method of any one of embodiments 1-10, wherein the one or more nucleotide modifications are present within (a) the coding region, (b) non-coding region, (c) regulatory sequence, or (d) untranslated region of the S-gene.

[0214] 12. The method of any one of embodiments 1-11, wherein the one or more nucleotide modifications results in one or more of the following: (a) altered expression of the S-gene; (b) generation of one or more alternative spliced transcripts of the S-gene; (c) deletion or alteration of one or more DNA binding domains; (d) frameshift mutation in one or more exons of the S-gene; (e) deletion or alteration of a substantial portion of the S-gene, or deletion of the full-length open reading frame of the S-gene; (f) repression or induction of an enhancer motif present within a regulatory region encoding the S-gene; (g) modification or deletion of one or more nucleotides of a regulatory element operably linked to the expression of the S-gene, wherein the regulatory element is present within a promoter, intron, 3′UTR, terminator, or a combination thereof.

[0215] 13. The method of any one of embodiments 1-12, wherein the one or more nucleotide modifications result in a sequence selected from SEQ ID NOs: 1, 2, 93, 94, 169, or 170.

[0216] 14. A method of reducing susceptibility to a pathogen in a plant, the method comprising: altering expression or activity of a protein encoded by a susceptibility gene (S-gene), wherein the protein is a clathrin adaptor medium subunit protein, a pentatricopeptide repeat-containing family protein, or an RPS2-like resistance protein.

[0217] 15. The method of embodiment 14, wherein the altering comprises one or more mechanisms selected from RNA interference, genome editing including gene replacement or allele replacement, gene knockout, and gene knockdown.

[0218] 16. The method of any one of embodiments 1-15, wherein the S-gene encodes a clathrin adaptor medium subunit protein comprising an amino acid sequence that is at least 80% identical to a sequence selected from SEQ ID NOs: 6, 64-92, 294-315.

[0219] 17. The method of embodiment 16, wherein the S-gene encodes a clathrin adaptor medium subunit protein comprising an amino acid sequence that is at least 80% identical to the sequence of SEQ ID NO: 6.

[0220] 18. The method of any one of embodiments 1-15, wherein the S-gene encodes a pentatricopeptide repeat-containing protein comprising an amino acid sequence that is at least 80% identical to a sequence selected from SEQ ID NOs: 98, 145-168, 326-330.

[0221] 19. The method of embodiment 18, wherein the S-gene encodes a pentatricopeptide repeat-containing protein comprising an amino acid sequence that is at least 80% identical to the sequence of SEQ ID NO: 98.

[0222] 20. The method of any one of embodiments 1-15, wherein the S-gene encodes an RPS2-like resistance protein comprising an amino acid sequence that is at least 80% identical to a sequence selected from SEQ ID NOs: 174, 219-240, 333.

[0223] 21. The method of embodiment 20, wherein the S-gene encodes an RPS2-like resistance protein comprising an amino acid sequence that is at least 80% identical to the sequence of SEQ ID NO: 174.

[0224] 22. The method of any one of embodiments 1-21, wherein the genomic locus comprises and is flanked by SEQ ID NO: 241 and SEQ ID NO: 251.

[0225] 23. The method of any one of embodiments 1-22, wherein the plant is of the species Spinacia oleracea, and the pathogen is of the phylum Oomycota.

[0226] 24. The method of embodiment 23, wherein the pathogen is at least one of the species selected from Peronospora farinosa (downy mildew); Peronospora effusa (downy mildew); Stemphylium botryosum f. sp. spinacia (Stemphylium leaf spot); Cladosporium variabile (leaf spot); Albugo occidentalis (white rust); Colletotrichum dematium f. sp. spinaciae (anthracnose); Phythium spp. (damping off/seedling blight); Fusarium oxysporum f. sp. spinaciae (fusarium wilt); Aphanomyces cochlioides (black root rot); and Verticillium dahlia (verticillium wilt).

[0227] 25. The method of any one of embodiments 1-22, wherein the plant is of the genus Helianthus, and the pathogen is of the species Plasmopara halstedii (downy mildew).

[0228] 26. The method of any one of embodiments 1-22, wherein the plant is of the species Zea mays, and the pathogen is of the species Peronosclerospora maydis (downy mildew).

[0229] 27. The method of any one of embodiments 1-22, wherein the plant is of the species Beta vulgaris, and the pathogen is of the species Peronospora farinosa (downy mildew).

[0230] 28. The method of any one of embodiments 1-22, wherein the plant is of the species Lactuca sativa, and the pathogen is of the species Bremia lactucae (downy mildew).

[0231] 29. The method of any one of embodiments 1-22, wherein the plant is of the family Cucurbitaceae, and the pathogen is of the species Pseudoperonospora cubensis (downy mildew).

[0232] 30. The method of any one of embodiments 1-22, wherein the plant is of the family Brassicaceae, and the pathogen is of the species Peronospora parasitica (downy mildew).

[0233] 31. The method of any one of embodiments 1-22, wherein the plant is of the family Solanaceae, and the pathogen is of the species Peronospora hyoscyami (downy mildew).

[0234] 32. A plant with reduced susceptibility to a pathogen comprising one or more nucleotide modifications at a genomic locus of the plant, wherein the genomic locus comprises a susceptibility gene (S-gene) encoding a clathrin adaptor medium subunit protein, a pentatricopeptide repeat-containing family protein, or an RPS2-like resistance protein.

[0235] 33. The plant of embodiment 32, wherein the one or more nucleotide modifications comprise a plurality of transitions such as GC to AT, transversions such as G to C or A to T, insertions, deletions, or a combination thereof in the S-gene.

[0236] 34. The plant of embodiment 32 or embodiment 33, wherein the one or more nucleotide modifications result in altered expression or activity of a protein encoded by the S-gene.

[0237] 35. The plant of any one of embodiments 32-34, wherein the one or more nucleotide modifications comprise an insertion, a deletion, or a single nucleotide polymorphism (SNP).

[0238] 36. The plant of any one of embodiments 32-35, wherein the one or more nucleotide modifications are present within (a) the coding region, (b) non-coding region, (c) regulatory sequence, or (d) untranslated region of the S-gene.

[0239] 37. The plant of any one of embodiments 32-36, wherein the one or more nucleotide modifications comprise at least one non-synonymous single nucleotide polymorphism (nsSNP) in the S-gene coding sequence.

[0240] 38. The plant of any one of embodiments 32-37, wherein the one or more nucleotide modifications results in one or more of the following: (a) altered expression of the S-gene; (b) generation of one or more alternative spliced transcripts of the S-gene; (c) deletion or alteration of one or more DNA binding domains; (d) frameshift mutation in one or more exons of the S-gene; (e) alteration or deletion of a substantial portion of the S-gene or deletion of the full-length open reading frame of the S-gene; (f) repression or induction of an enhancer motif present within a regulatory region encoding the S-gene; (g) modification or deletion of one or more nucleotides of a regulatory element operably linked to the expression of the S-gene, wherein the regulatory element is present within a promoter, intron, 3′UTR, terminator, or a combination thereof.

[0241] 39. The plant of any one of embodiments 32-38, wherein the one or more nucleotide modifications result in a sequence selected from SEQ ID NOs: 1, 2, 93, 94, 169, or 170.

[0242] 40. A plant with reduced susceptibility to a pathogen comprising altered expression or activity of a protein encoded by a susceptibility gene (S-gene), wherein the protein is a clathrin adaptor medium subunit protein, a pentatricopeptide repeat-containing family protein, or an RPS2-like resistance protein.

[0243] 41. The plant of any one of embodiments 32-40, wherein the S-gene encodes a clathrin adaptor medium subunit protein comprising an amino acid sequence that is at least 80% identical to a sequence selected from SEQ ID NOs: 6, 64-92, 294-315.

[0244] 42. The plant of any one of embodiments 32-40, wherein the S-gene encodes a pentatricopeptide repeat-containing protein comprising an amino acid sequence that is at least 80% identical to a sequence selected from SEQ ID NOs: 98, 145-168, 326-330.

[0245] 43. The plant of any one of embodiments 32-40, wherein the S-gene encodes an RPS2-like resistance protein comprising an amino acid sequence that is at least 80% identical to a sequence selected from SEQ ID NOs: 174, 219-240, 333.

[0246] 44. The plant of any one of embodiments 32-43, wherein the genomic locus comprises and is flanked by SEQ ID NO: 241 and SEQ ID NO: 251.

[0247] 45. The plant of any one of embodiments 32-44, wherein the plant is of the species Spinacia oleracea, and the pathogen is of the phylum Oomycota.

[0248] 46. The plant of embodiment 45, wherein the pathogen is at least one of the species selected from Peronospora farinosa (downy mildew); Peronospora effusa (downy mildew); Stemphylium botryosum f. sp. spinacia (Stemphylium leaf spot); Cladosporium variabile (leaf spot); Albugo occidentalis (white rust); Colletotrichum dematium f. sp. spinaciae (anthracnose); Phythium spp. (damping off/seedling blight); Fusarium oxysporum f. sp. spinaciae (fusarium wilt); Aphanomyces cochlioides (black root rot); and Verticillium dahlia (verticillium wilt).

[0249] 47. The plant of any one of embodiments 32-44, wherein the plant is of the genus Helianthus, and the pathogen is of the species Plasmopara halstedii (downy mildew).

[0250] 48. The plant of any one of embodiments 32-44, wherein the plant is of the species Zea mays, and the pathogen is of the species Peronosclerospora maydis (downy mildew).

[0251] 49. The plant of any one of embodiments 32-44, wherein the plant is of the species Beta vulgaris, and the pathogen is of the species Peronospora farinosa (downy mildew).

[0252] 50. The plant of any one of embodiments 32-44, wherein the plant is of the species Lactuca sativa, and the pathogen is of the species Bremia lactucae (downy mildew).

[0253] 51. The plant of any one of embodiments 32-44, wherein the plant is of the family Cucurbitaceae, and the pathogen is of the species Pseudoperonospora cubensis (downy mildew).

[0254] 52. The plant of any one of embodiments 32-44, wherein the plant is of the family Brassicaceae, and the pathogen is of the species Peronospora parasitica (downy mildew).

[0255] 53. The plant of any one of embodiments 32-44, wherein the plant is of the family Solanaceae, and the pathogen is of the species Peronospora hyoscyami (downy mildew).

[0256] 54. A method of identifying a spinach plant with increased resistance to downy mildew, the method comprising: a) detecting in a spinach plant an allele associated with increased resistance to downy mildew, wherein the resistant allele comprises a “T” at Spov3_chr4_93275081, an “A” at Spov3_chr4_105049870, an “A” at Spov3_chr4_107241402, an “A” at Spov3_chr4_109546568, an “A” at Spov3_chr4_109698808, an “A” at Spov3_chr4_112008390, a “T” at Spov3_chr4_112574123, a “T” at Spov3_chr4_117783935, an “A” at Spov3_chr4_118191085, an “A” at Spov3_chr4_118788268, or an “A” at Spov3_chr4_121142541; and b) identifying a spinach plant comprising the resistant gene allele as having increased resistance to downy mildew.

[0257] 55. A method of identifying and/or selecting a spinach plant having increased resistance to downy mildew, the method comprising: a) screening a population with a marker located within an interval on chromosome 4 comprising and flanked by SEQ ID NO: 241 and SEQ ID NO: 251 to determine if one or more plants from the population comprise a resistant allele; and b) selecting from said population at least one plant comprising the resistant allele.

[0258] 56. The method of embodiment 55, further comprising: c) crossing the plant of b) to a second plant; and d) obtaining a progeny plant that has the resistant allele.

[0259] 57. The method of embodiment 55 or embodiment 56, wherein the resistant allele comprises a “T” at Spov3_chr4_93275081, an “A” at Spov3_chr4_105049870, an “A” at Spov3_chr4_107241402, an “A” at Spov3_chr4_109546568, an “A” at Spov3_chr4_109698808, an “A” at Spov3_chr4_112008390, a “T” at Spov3_chr4_112574123, a “T” at Spov3_chr4_117783935, an “A” at Spov3_chr4_118191085, an “A” at Spov3_chr4_118788268, or an “A” at Spov3_chr4_121142541.

[0260] 58. A spinach plant comprising broad-spectrum resistance against Peronospora effusa, wherein the resistance is conferred by an introgression fragment comprising a susceptibility gene (S-gene).

[0261] 59. The spinach plant of embodiment 58, wherein the S-gene is present in plants grown from seeds of Nr.22-18, a representative sample of seeds having been deposited under accession number NCIMB 43773.

[0262] 60. The spinach plant of embodiment 58 or embodiment 59, wherein the introgression fragment comprises one or more of SEQ ID NOs: 1, 93, 169.

[0263] 61. The spinach plant of any one of embodiments 58-60, wherein the spinach plant comprises at least one allele selected from a “T” at Spov3_chr4_93275081, an “A” at Spov3_chr4_105049870, an “A” at Spov3_chr4_107241402, an “A” at Spov3_chr4_109546568, an “A” at Spov3_chr4_109698808, an “A” at Spov3_chr4_112008390, a “T” at Spov3_chr4_112574123, a “T” at Spov3_chr4_117783935, an “A” at Spov3_chr4_118191085, an “A” at Spov3_chr4_118788268, and an “A” at Spov3_chr4_121142541.

[0264] 62. The spinach plant of any one of embodiments 58-61, wherein the spinach plant comprises resistance at least against Peronospora effusa races 1-20 including but not limited to Pe:4+, Pe:5, Pe:12, Pe:14, Pe:16, Pe:17 and Pe:19, or at least against Peronospora effusa races 1-19 including but not limited to Pe:4+, Pe:5, Pe:12, Pe:14, Pe:16, Pe:17 and Pe:19 and uncategorized Pe-isolates 4US and UA2016-21A (Pe:21A).

[0265] 63. The spinach plant of any one of embodiments 58-62, wherein the spinach plant is a hybrid plant.

[0266] 64. The spinach plant of any one of embodiments 58-62, wherein spinach plant is an inbred plant.

[0267] 65. A seed from which a spinach plant of any one of embodiments 58-64 can be grown.

[0268] 66. A leaf of a spinach plant of any one of embodiments 58-64.

[0269] 67. A progeny plant of a spinach plant of any one of embodiments 58-64.

[0270] 68. A part of the spinach plant of any one of embodiments 58-64, wherein the part is selected from a stem, a cutting, a petiole, a cotyledon, a flower, an anther, a pollen, an ovary, a root, a root tip, a protoplast, a callus, a microspore, a stalk, an ovule, a shoot, a seed, an embryo, an embryo sac, a cell, a meristem, a bud, or a leaf.

[0271] 69. A cell culture or tissue culture comprising a cell or a tissue derived from the part of embodiment 68.

[0272] 70. A food product comprising harvested leaves of the spinach plant of any one of embodiments 58-64.

[0273] 71. A container comprising the spinach plant of any one of embodiments 58-64, in a growth substrate for harvest of leaves from the plant.

[0274] All publications and patent applications mentioned in the specification are indicative of the level of skill of those skilled in the art to which this invention pertains. All publications and patent applications are herein incorporated by reference to the same extent as if each individual publication or patent application was specifically and individually indicated to be incorporated by reference.

[0275] Although the foregoing invention has been described in some detail by way of illustration and example for purposes of clarity of understanding, it will be obvious that certain changes and modifications may be practiced within the scope of the appended claims.

[0276] The following examples are offered by way of illustration and not by way of limitation.

### EXAMPLES

[0277] Note: Although the following examples 1 to 7 mainly focus on and show the results of experiments performed with P. effusa race Pe:16, very similar results were obtained with P. effusa races Pe:4+, Pe:5, Pe:12, Pe:14, Pe:17, Pe:19 and Pe:21A.

### Example 1: Identification of EMS Induced Variation Conferring Resistance to P. effusa

[0278] Spinach inbred line B11-5Sep. 7, 1941-2sel. (hereafter referred to as B11-509 line) is resistant to races Pe:1 to Pe:15, Pe:17, and Pe:18 but is susceptible to Pe:16, Pe:19 and some other, uncategorized, Pe-isolates such as 4US and UA2016-21A. Seeds of the B11-509 line were treated with 0.4% of the mutagen EthylMethaneSulphonate (EMS) to induce genome-wide GC>AT transitions. EMS can also induce other changes at a low rate. Individual M1 plants were selfed and seedlings of M2 families were used for screening for DM resistance by inoculation with isolate Pe:16. An M2 family, EMS22, was found to segregate for DM-resistant and susceptible plants. M3 families were obtained by selfing three resistant and seven susceptible M2 plants. Retesting with isolate Pe:16 confirmed the resistance and susceptibility pattern in these ten M3 families. Testing with uncategorized isolate Pe:21A showed that the resistance is working more broadly, and is likely effective against all other current and future races of Peronospora effusa due to the mechanism of action of this resistance.

[0279] Two approaches were taken to investigate which chromosomal region, and ultimately which specific mutation is causal for the observed DM resistance: Bulk Segregant Analysis (BSA) of selfed M3 families and genetic mapping in Viroflay backcross F2 populations.

[0280] The BSA was performed on pooled gDNA of three resistant and seven susceptible M3 families (R and S-pool). Resequencing of the two pools and mapping to the Viroflay reference genome Phytozome: Soleracea_575_Spov3 yielded variants of the (1) B11-509 line used for EMS treatment (2) the R-pool and (3) S-pool. Scanner plots of SNP coverage of the two pools for six chromosomes showed that the highest percentage of near homozygous R-pool SNPs combined with very low percentage S-pool SNPs and absolute absence in the B11-509 data, was detected in a 20 Mb proximal and a 6.2 Mb distal region of Chr4 (FIG. 1). SNPs in these regions were validated for their effect on gene models of the reference genome: several SNPs were in exons of predicted genes and three SNPs cause non-synonymous amino acid changes. Said three non-synonymous changes are predicted to have an effect on the protein of gene Spov3_chr4.04649, a putative resistance RPS2-like protein, on gene Spov3_chr4.04219, relating to a putative Pentatricopeptide repeat-containing family protein and on Spov3_chr4.04752, relating to a putative Clathrin adaptor medium subunit protein.

[0281] Note: gene model Spov3_chr4.04129 is not correct and was replaced by Sp75 gene model Spo10764 (SEQ ID NO: 96, see Table 3).

[0282] For genetic mapping, backcrosses of three resistant M3 plants to Viroflay (susceptible to all races of Pe) were made and segregating F2-plants for each cross were phenotyped with Pe:16 and genotyped in KASP assays with 142 R-pool specific SNPs from the BSA, covering all six chromosomes. Some two thousand F2 plants of eleven F2 offspring were phenotyped and showed a significantly 1R: 3S ratio as expected for recessive impaired S-gene inheritance. The KASP genotyping yielded 91 informative, segregating SNPs and all positive and negative control scores were consistent. GWAS analysis of 91 SNPs informative for EMS transitions and susceptibility/resistance scores to Pe:16 showed that as in the BSA, a clear correlation of 11 SNPs at the distal end of Chr4 was detected (FIG. 2). This includes the three BSA-derived SNPs in the three candidate S-genes.

### Example 2: Identification of the Causal Gene for Resistance (S-Gene)

[0283] Note: in the present context, the S-gene or susceptibility gene, may also be denoted as the causal gene for resistance. ‘Resistance’ in the present context is the loss of susceptibility.

[0284] A clear correlation of the susceptibility-locus (S-locus) with the mentioned 11 SNPs at the distal end of Chr4 was detected (see Example 1, and FIG. 2). This region spans 6.2 Mb. For further fine-mapping of the S-locus and to address the stability of the S-locus in other spinach backgrounds, two sets of new crosses were made; crossings of a specific EMS22 inbred line (X20-10-1) with Viroflay and crossings of EMS22 inbred lines to three PV-elite lines containing the DM-resistance locus referred to as RPF13 (X17-003). Segregating F2-plants for each cross were phenotyped with Pe:16 and genotyped in KASP assays with the 11 SNPs. Some thousand F3 plants of both backgrounds were phenotyped and showed a significantly 1R:3S ratio as expected for recessive impaired S-gene inheritance. No notable phenotypic differences were detected within the two backgrounds. The genotypic results showed that the underlying mutation leading to resistance to Pe:16 was mapped proximal of SNP 117783935_GA (SEQ ID NO: 337) in the candidate gene Spov3_chr4.04649, a putative resistance RPS2-like protein. For additional fine-mapping, 70 SNPs specific for B11-509/Viroflay were selected in the genomic region 112-118 Mb and used to detect recombination in the two backgrounds. The highest correlation was found for three SNPs in the region of the RPS2-like candidate gene (FIG. 3). In one population of the two backgrounds, recombination events closest to the RPS2-like gene were detected resulting in a region of 0.62 Mb between two flanking SNPs, SNP 117443435_AG (SEQ ID NO: 336) and >118064634_TC (SEQ ID NO: 338) (sequences listed below). The subsequent research focused on said RPS2-like gene.

SNP Listing.

>117443435_AG-SEQ ID NO: 336
AAGGAACTCTTGAAAGATACAATGGTGAAGAAGCAGAGCTTAATAAAGACTAAAATATGATTA
AGTTAGTGAAAGAAAAGGATTCAATGGCCCTGCATGTAGCAAACAAATAGTGTCACAAAAGTG
AAAAAGATGTACACCGCATAATCCACAACTAATGATGCAAGCTTTAGTTGAGGTTCAAGGCTA
AAACAATCACCAT
>117783935_GA-SEQ ID NO: 337
TGTAAGGTCTCAGCATTGGTGCATATTAGAGAGCTATCATCTACAGGTTGGTTTTGAGGTGAG
ATCTGAGCAACCATACAACAGAAGAGTATCACTCTCCGAGATGTTCTTTGACTGGTCAAGAGG
GAGACTACGTTGTGCTTCCAAGTAACATCCAGGAGTTGTATGTTGATAATTGCAGAGACTTTC
GTTGCCTATCTGA
>118064634_TC-SEQ ID NO: 338
TTTTTGGTCCCTACAAGATTATTTTCTGCCAAACTCGACTCTACCCATTCAATACTTCGTATGAA
AAGAGGCTTGAACATAGTCTCTGTCATCTTCATCGTCCAAAGCAACCACCGCACCAATGACAT
GTTTCTCCACGAAAGTAATATTCTCAATTGATTCAAGGTGCTGACTGCGGAGATCCAGAGCCA
GCATACAGAAG

### Example 3: Identification of Causal Mutations for Plant Resistance Against P. effusa

[0285] In addition to the reference genome Viroflay SpoV3 used in the aforementioned BSA, new high-quality references were made of both Viroflay and inbred line B11-509. The Chr4 distal region of 0.62 Mb containing the S-locus was compared by Whole Genome Alignment analysis. Short read sequences of one individual mutant M3-plant (EMS22-20) were obtained and used for mapping to the new references. It is known that next to genome-wide GC>AT transitions, EMS can also induce other changes at a low rate. Therefore, the new read mappings were used in both Small Nucleotide Variation calling as well visual inspection of larger deletions and duplications. One larger deletion was detected in Gene Model SOV1g044450, ortholog of candidate gene Spov3_chr4.04649 (RPS2-like) in the new high-quality Viroflay reference. The deletion is close to the previously detected G>A transition causing the neutral non-synonymous amino acid change. The deletion is 191 bp and was confirmed in read mappings of a pool of resistant plants used in the BSA. The deletion was absent in read mappings of both B11-509 and a pool of susceptible plants used in the BSA. The deletion could be reconstructed by re-assembling unmapped reads of EMS22-20 in contig_59494. Three additional changes were detected in an alignment of contig_59494 and SOV1g044450: one rare G>C transition 4 bp of the left border of the deletion, one T insertion at the left border, and one G insertion at the right border (FIG. 4, and sequences listed below). All changes to SOV19044450 were confirmed by sequencing of individual PCR products of resistant EMS-induced plants and were absent in PCR products of susceptible families and controls. Furthermore, a full-length cDNA of EMS22-20 and B11-509 was cloned and sequenced confirming the changes. Due to the insertions the deletion is 189 bp and causes one amino acid change, K491N. The G>C transition also causes an amino acid change L493C. The third amino acid change G416R is caused by the G>A transition detected in the BSA (FIG. 5, and sequences listed below). The RPS2-like gene encodes for a putative resistance gene of the NLR class containing an N-terminal Nucleotide Binding motif and five Leucine Rich Repeat (LRR) motifs. The 189 bp deletion causes the removal of 2 C-terminal LRR motifs in the protein. In summary, EMS-treated mutants of family EMS22 that are resistant to Peronospora effusa have causal mutations in gene SOV19044450: two nucleotide transitions, two nucleotide insertions and one 189 bp deletion causing three amino acid changes and deleting 63 amino acids comprising two C-terminal LRRs.

Nr22-20pI5-EMSline_S3_L001_(paired)_contig_59494-RC SOV1g044450.1 genomic
sequence/locus-
SEQ ID NO: 339
TATATATAACAATGACAATACTTATATAACCGATGACAATATATAACAAGTTAGCAACACTATTT
AAGTGTGGGCCATCTTTTCAACTTTTTTTTTTTTTTTAAGGGTGGGTATGGATTTTTTTTGTCGC
TGGTGGACAGCGATGTAGCCAACCTCTAATACGGAGTATGATGAAAGATATAAGTTTGAGCAA
AAAAAGTCTTACACGCATATAATAAATTTATTGCATGTCAGGAAAACTACTTCCTAAATTTTTGT
AACTTTTAACTAATTTTTTGTAACTTTTATATTATAAAAAAAATTGATAGATAAACATGTGTTAAA
TGATTAATTTTTTACATTATTAACAAATTTGAAAAAATATTTTTTATTAAAATGAAAATTTTTATC
ACTAAAAAAAAAATACTGGAGTAGATGTCATTTACAAAGAGTAACTTTTAAGCATTTTAAAACA
ACTTTTACTCCAACTTATAATATTAAGTCTGAAATGGGTTGTATAATTATTAACATAGATTCCAT
AATTTTACTCTTTTTACCAAAAATTGCACTTAAGTTCATTTTCATTTCAATAGTTTTGTTACCGGC
TATCTTACGGATGTTTGTGTGACAAAGACTTTATTCTCATCACTTAATTTGGTCTGATATGATAA
GATCTGATCTGAAAGATGTATATGACTGCTTTTTGATTTTTTGTCCTTACGGATGTTTGTAAAAC
CAAGACTTTGTTCTCCTCATTTTTTGTCTAATATGATCTGATCTGAAAGTTATATAAGTGCTTTT
TTTATTTTTGTCTTTTCTAATTTGATATAATTTTTTTTCTGATCTGATCTAATTTTTCTGAACAATT
TCGCATTCATACAGACGTACTCCCTCCGTATTTATTTAAAGGATGCACTTGACTTTTCCGGCCG
TATTTATTTAAGAGATACACTTGCCATTTTTAGTAACTTATCAACCCCACCATCTAATTAAATAA
TACTCCCTCCATTCCTAAATAAGTGTCCAGTTCCCATAAATAGAGTTCCCTTATAAGTGTCCAG
TTTTCATTTTTGGACATACATCTTTCTCACTTTTCTATACACTTTTCTCACTTTTTCACACACTTTT
CCCATTTTTCTATAAATCATTATTACTTTTTATTACACATTCTACACTCTTCATACTTTTCAATCA
CCACATCCACTTTTATTTATACTTTATCAATAAACAATTATCTACTTTTTCCTTTCCCAAAAAAAA
AATATTCTCAATCATTACCTCTTACACACAATTCAGTTTTATTAATCACGCGTAAATGTCCAAAG
TGGACACTTATTTAGGAACGAAGGGAGTACATCTAATTTACCCTATGACCTACCATCCTATTAA
ACAAATAATTTCATAAACCCACCCCACCTCCCACCCCACCAAAATGACATGGTCCCACTTGTTT
ACTTATTAAAATATCACCCAATCCCACTTATTTTATTATTATATTTCATTTAATTTTTTTCTTAATA
CCCGTGCTCGACTAAGTGTATCCGTTAAATAAATACAAAGAGAGTAGTTAACAGGTTCACATTT
TTTAAAGTCTAGTCCGTTGGGCGATAGTAGACTTTTTTTGGGTTTAAATTAGTACCCAGTTTTC
TTAAATATGAGGAGCCTAGACATTTTAAGGAGTTAACAAAAATGGAGAGCACTTTTCTTCACTG
ATACAGAGTAGCTCATATTCGTCAGTTATGGCGCATCAGGTTCGAATTTTTCTTCCTAATTATTT
GTGCAGGCTGTAGATATCATCTTATTCTTTCAAATTGCTTAATTTAATTTAATTTAATTATTAAG
GCCATGTTCTTGAGATTACTATAATTTCTTATGAGTTACTGTTCTTAATTTCTAAATTTCTTCATT
GAGATAATTAAAAACAGCAAAATTAAGCAAGAATCATAACAATACAGTTACTGAGTACATATTA
ATACTGTAATAAATAAATAGTAATTGTTTTTTTTGGTTTTTGTTTTTGTTTCCGTAGATCCAAATT
CCAATCAAGATGATTTCGATTATTGCTAATTTGTTTGGGATAGGAAGGTATCACCGCGGTGTA
CCGTGTGATGGAGGAACTCTTGATAATCATCAATCTGAATTGAGTAGTGTTCTTATACAACCTC
AAAATAAACGAAGAAAAGTTGAGGAATTTCTTTGGTTTAATACTGAGTATGTTGATAGAATTAT
TGGTTGGTTAAAGGATAGTGAGATTGATACTATTGGTGTTTATGGGATGGGTGGAGTTGGGAA
GACCACCCTCGCAACTCAGCTCCAAACTCGGCTATTGAATCATGTTGTTGCCTGGGTTTCTGT
GGGGGTGGATTTTACTGTATATAAGTTGCAACAAGATATTGCCGGGTCATTCGGGCTTGATCT
TCAAGGGGATAGGGATGCGATTAGAAGAGCAGCTATGATTAGTGAGTTTTTGTGTCGTAATCA
TAACTGTGTACTCTTCCTTGATGATTTATGGGGTGATTTCCGTAGAGAAGATGTTGGAATTCCC
AGAAAATGTAAGTTGATTGTCATTTCTCGGTTGCTGGATGTGTGTCGTAAGCTTCGTTGCAAG
AAGGTAGTTAAGGTTGAGCCACTTCAAGAGGAAGAGAGTTGGCAGTTGTTTAACCGTAGCATA
GGGTATGGTGTTTTGAATTCTGTAGATGTGTGTCGTATTAGGAAGCTCGTGTATGATAAGTGT
GTAGGTCTCCCTCTTGCTATCACTAGTTTAGCAACCAGTTTGAGGAAGATGGTTGATGATGAT
AATCCTTCTAGTTGGAGGGAAGTTCTCGAGAATTTTGATCTTCTATCTGCGAAACAACCTCACT
TGGAAGATACATTTAGTCAGTTGAGGTTGTCATACGAAAGGTTGAACAACAAACCCCAGCGTT
GTTTCCTGTATTCTGCATTATACCCCAAAGGCTATGCCATCAGGAAAGAAGAGCTGATTCGTG
TTTGGATTGGAATGGAGCTGATAGATGACGTGCCATCATTGCAGGCACGGTATAACATGGGC
CATTCTATATTGAATAAACTTGTTGACTCTTGTTTGCTGGAAACATATGATAATGATAACATAAT
CAAGATCAATGATCTTGTTAGGCATATGGCTCTTTCCATTGCCGGAGATAGTTACATGGTAGA
AGCTGGAATACCTACAAATTTTGAGTTCCGGGAAAATCTCCGTGTTGTTTCCTTGGTGAATTCT
TCAATACCATCGATCCCATCAGGTGCTTCCCTTATTAAGTGTCATTGTCTCTCTACTTTACTTCT
GCAACACAACTCCCTTGAGTTTATCCCAGAGTCTTTTTTCTTGCACATGCGTGGCCTTCGAGTT
TTGAATCTATCTGATACGAACTTAATTAGACTGCCGAGTTCCATTGATGCCCTTGAAGAGCTTC
GAGTCTTGGATCTTAGTTTCTGTCAAAACTTGAAGCAAGTGACATCATTGTCAAACCTTT┌ ┐GT
GAGCTGCAGAATGTGAATTCATTAGAAGTTCTTGATGCCAGATTCTTAAACCTTTGTGACCTGA
GCAGTTATGTAAGGTCTCAGCATTGGTGCATATTAGAGAGCTATCATCTACAGGTTGGTTTTG
AGGTGAGATCTGAGCAACCATACAACAGAAGAGTATCACTCTCCAGATGTTCTTTGACTGGTC
AAGAGGGAGACTACGTTGTGCTTCCAAGTAACATCCAGGAGTTGTATGTTGATAATTGCAGAG
ACTTTCGTTGCCTATCTGATGTCTTGCTTCCTGTTGCATATCGTCATAGAAACTGCCAGAACGG
TGCAAGTGTAGACAGTTGCAACGGAGAGCAAGCTGAAGTTTTTGCAGGGCTTGAAATGTGCA
TTATCAGTAGATGCCAGGATGTTAAGACACTATTTGCACCAAGTTGGGTGGAGGAGAATCTCC
AATCCCTTGAATTATTACAAGTTGAAAATTGTAGACAAGTGAAGGAGATAATTGCAGAGGAAG
TTGTGGAATGTGGTCATTCTGAAGGAAAGGATGCTGTCATTAGCCTACCCCAACTTACGCGGC
TAGTTCTGACTCTGTTGCCTCAAGTGCATAGTGTCTATAAAGGTCTGCTAGTTTGTTCTTCACT
TCTGTGGTGTACTITTATGGACTGTCCAAAACTGAAGCGCCTTCCGTTCTCCAACATGGATCGT
CTAGAATGGATTGAAGGTCAAGAAAAATGGTGGGACTTGTTGGAATGGGATGAACCGGAATC
CAAAGCTTCGCTCAGACCCTTGTTTAGATGCAAGTCTGTGGATGGTGATCGATAACTGACTTG
ACCATCTTGCTGTGCTGGAGCTTGCTAGCTAGCTGTTTCAGAGTCCGAGATAAAACTTGTGTT
AAATGGTTCGCCTGCTTCCCTTCTCTTCCCCCAACCCCAACCCCAACCCCAACCCCAACCTCAC
CCTCACCCTTGCATTTCTTTTTTCAAATATACTTAGAAAAATAAAGAACAGGTAGAAGCCCATG
GTTGGCTTCCCAAATGTCAATCCTTCCTATTTCCTAAGATCAATTGTAGAGATGGATAACATCA
TCAAATATCGTATTAATCTTGTATTAATCTTGATAACGGATTCATATATGTTTTTATATAATAAAG
AATGATTATAATTGAGGCGAAAATAGAAATTTACGCTGTACGTAGTACTACATTGCAACCCAAA
AATTCACGCCACAAATTTTCGTTACTATTTACATTATTAATTCAGTTTAATGTCATAAAGGATAT
TATTGCATACTCTGTATAAGCTTCAATCATTGTTTATTAAACCACATATTACTTCATTTGTGTTTA
CTATTTATATGGACAAAGTTTTTAAATTTTGACCATATATGATAGTTAGATAATAGAAAAGGTTA
TTATCTTGTTGGATCAACATTGGATCCGTTTCAATAAATAAAAATTTCAACTAGTTCGTATCACT
TTTTTCTATCAGGGCCAACACTCGTAGCGGGAAAAATAATCTAGCGTGTTTGGAGGACTTTTG
GAAAGATATGGATTGGAATGAAGTTCATTTTATTTCAATTTCAATTTCAATGTTTGGTTAGGCAT
TTTAGATATATATGGAGTACTTGTGAAGAAATATGACGAGGAACACGTACGGTTGAGTTATGG
TTAAGTTCCTGCCCACATATTTGATATTTCTGGTTGAGTTCCTGTTATTCTTTACACTGCGATAA
AGCCCTCACATGTGACATAAAGCCACTACCTTGGCAGCCTCATTTTGTCTGCTAGTCAGTTTTG
AGAGTAATGCACCACAGTTGAGAAATGAACCGAGTGATTTTGAATGTTCCTTGCCTTGGTGGT
TATTGTTATATAAGCTCGTAAGTTTGTTATCAGGGGCACGGTAATACGGTATGATGAAAGAAG
ACATTCCATATGTTATCTTTTCCGCAACAATATAAACAGCATTCTAAATTCGAATGGTGCAAGA
ATTTATTACTTGACTGATAAAATCCAGCATGATCTCGGTAGATCAGCAACTTACAACGTAACTT
GAACAAATACGAAGTAAACTTTGAATAAATAAATGATGCTTGCTAGCTTCAATTCCATGGCAAA
TCGCGATTAGTTGCTTACTGGTGAGCTCCGTCTTTCAGCACAGAAATGAACGTCAACCAGACC
TGTTATACCAGCAGTTATCTTTTGTCCGGGTTTCACAGGCCCGATACCTTCTGGGGTGCCTGC
ACAAGACAAAAAACACATCAGAGTCTGGGCTATCAAGTTTACACACACAGAAACAGCAAAGTC
TAACAAGTAGTCTGTACTGTACCTGTTAGGATGACATCTCCTTCCATAAGTGTCATGAAGGAAC
TGATGTGGCTAATCAGGAATGGGATTTTGAATATCATGTCTTTTGTCGATCCCTTCTGCTTCGA
TTCTCCATCAACCTTTTTGTCATATAATTAAACTTGTTTACATTTGTATTAATACAATCACAAACA
ATTACATAGAATGTATTTACAGAGTTGAACTCACATCCAACCACAGCTCCAAGTTATGAGGATC
AGGCACTGCAGATACTGGAATCTGCAGAAAATTGACAAACCAGGGATCGGATAAATAATCCAG
CCATATACTGTACTGGACTCCTAATTATTTGTCGAATTCGACACAACTACATGAATTATACAAAT
CATATCATACCATTTCACTGATAGGGGTAAACGTGTCGAGTCCTTTAGCTAGTAGCCATGGAA
GACCTGTTGCCTAACAGAAGGAAAGGAGAAATTGTGAAACAGAATGTCAGGGGAGTATCTGA
AGTTTATTACATTATAGTTTTATAAATGGCAGAAACTGAATGTCAATACAAGTAAATTTCCACTG
AATGTACAAGTCAATGTTAAGAAGTATATGAACATATAGTCAAGATAATCACCTTAATTGTGGC
TTGGAGTTCCTTTGCTGTCATATCAAGTCCTAAAGCATAGCCTGAAAACTCAAAAACAATTTTT
TAAGTTGCTAATTATACTAAACTACTGAAGTTGTAACACACAGTACTTACTACAAGTAGTTCGT
GATTATGGAATAAGGGTGAACATTATTCTCATCCACCGGACCGGCCCGGCCCGGCCCTGATTA
CTCAATCGTAGTAAGAGTGGACATTACAGTGTAGGAAAGATGTCAACTTTTCCGTGCATTCTAT
AGATTAATTCTCAATTTCTCATTGCCATGAAAGAAACTCATAAAGAGTGACTTCTAACTAATTGT
TGTCCGTCCTTAGGGAGGATTTCTAAACCTCAAGTGACTTGTGTCCATATGAATACAAGTGAG
TACCAATACAGAAAATTTAGTACCAATACAAAATTTTAGTACCATTAACACAAAATTGCTTAGAA
ATATCAATACAAGTCATTTTGTGTTATTGGTACTAAAATATGATATATTGGTACTAAATTTTCTG
TATTGGTACTCGCTTGTGTTTATACACAAGTCACTTGAGGCCTAGACTTCCTCGTCCTCAGGCC
CTCCTCCCATACTCTAACATGTAGTCACGTGACTCACGTGTTTAAGCAATCATGAAGTCATGAG
GTGGTGAGGATGAGTTTGGAATCTAATATATATATATATATATATATAAAGGGGAGTTTTTTGG
AGAGATTTTAGAGCGTCCACGTAGGATTGTCCAGTCACATAATTAAATATTAATTTTATTITTAA
ATGATAAATAATGAGATAAAATTAAATATAATAGTAGTCAAATACTGATAAAAGACAATAAGGA
ATAATATTATCAGTAAAAGTATAGGATAATTATTATC
>SOV1g044450.1_coding sequence-
SEQ ID NO: 340
ATGGCGCATCAGATCCAGATTCCAATCAAGATGATTTCGATTATTGCTAATTTGTTTGGGATAG
GAAGGTATCACCGCGGTGTACCGTGTGATGGAGGAACTCTTGATAATCATCAATCTGAATTGA
GTAGTGTTCTTATACAACCTCAAAATAAACGAAGAAAAGTTGAGGAATTTCTTTGGTTTAATAC
TGAGTATGTTGATAGAATTATTGGTTGGTTAAAGGATAGTGAGATTGATACTATTGGTGTTTAT
GGGATGGGTGGAGTTGGGAAGACCACCCTCGCAACTCAGCTCCAAACTCGGCTATTGAATCA
TGTTGTTGCCTGGGTTTCTGTGGGGGTGGATTTTACTGTATATAAGTTGCAACAAGATATTGCC
GGGTCATTCGGGCTTGATCTTCAAGGGGATAGGGATGCGATTAGAAGAGCAGCTATGATTAG
TGAGTTTTTGTGTCGTAATCATAACTGTGTACTCTTCCTTGATGATTTATGGGGTGATTTCCGT
AGAGAAGATGTTGGAATTCCCAGAAAATGTAAGTTGATTGTCATTTCTCGGTTGCTGGATGTG
TGTCGTAAGCTTCGTTGCAAGAAGGTAGTTAAGGTTGAGCCACTTCAAGAGGAAGAGAGTTG
GCAGTTGTTTAACCGTAGCATAGGGTATGGTGTTTTGAATTCTGTAGATGTGTGTCGTATTAG
GAAGCTCGTGTATGATAAGTGTGTAGGTCTCCCTCTTGCTATCACTAGTTTAGCAACCAGTTTG
AGGAAGATGGTTGATGATGATAATCCTTCTAGTTGGAGGGAAGTTCTCGAGAATTTTGATCTT
CTATCTGCGAAACAACCTCACTTGGAAGATACATTTAGTCAGTTGAGGTTGTCATACGAAAGG
TTGAACAACAAACTCCAGCGTTGTTTCCTGTATTCTGCATTATTCCCCAAAGGCTATGCCATCA
GGAAAGAAGAGCTGATTCGTGTTTGGATTGGAATGGAGCTGATAGATGACGTGCCATCATTG
CAGGCACGGTATAACATGGGCCATTCTATATTGAATAAACTTGTTGACTCTTGTTTGCTGGAAA
CATATGATAATGATAACATAATCAAGATCAATGATCTTGTTAGGCATATGGCTCTTTCCATTGC
CGGAGATAGTTACATGGTAGAAGCTGGAATACCTACAAATTTTGAGTTCCGGGAAAATCTCCG
TGTTGTTTCCTTGGTGAATTCTTCAATACCATCGATCCCATCAGGTGCTTCCCTTATTAAGTGTC
ATTGTCTCTCTACTTTACTTCTGCAACACAACTCCCTTGAGTTTATCCCAGAGTCTTTTTTCTTG
CACATGCGTGGCCTTCGAGTTTTGAATCTATCTGATACGAACTTAATTAGACTGCCGAGTTCCA
TTGATGCCCTTGAAGAGCTTCGAGTCTTGGATCTTAGTTTCTGTCAAAACTTGAAGCAAGTGAC
ATCATTGTCAAAGCTTCTGAAATTACAGTTTCTAAACCTCTCTCAGACTGGAATTGGTCCAGCT
CCTCGTTCTCTTGAAAACTTAAAAAGTCTCACAGAACTCAACCTCTCATCTATTCCCGAACCAC
AAAAAATTCCTAGTGGTGTGTTGCCAGCCTTATTCAGACTCAAAAGATTAGCATGCTATGTTGT
AGAAGCTGCTATTCATGAGCTGCAGAATGTGAATTCATTAGAAGTTCTTGATGCCAGATTCTTA
AACCTTTGTGACCTGAGCAGTTATGTAAGGTCTCAGCATTGGTGCATATTAGAGAGCTATCAT
CTACAGGTTGGTTTTGAGGTGAGATCTGAGCAACCATACAACAGAAGAGTATCACTCTCCGGA
TGTTCTTTGACTGGTCAAGAGGGAGACTACGTTGTGCTTCCAAGTAACATCCAGGAGTTGTAT
GTTGATAATTGCAGAGACTTTCGTTGCCTATCTGATGTCTTGCTTCCTGTTGCATATCGTCATA
GAAACTGCCAGAACGGTGCAAGTGTAGACAGTTGCAACGGAGAGCAAGCTGAAGTTTTTGCA
GGGCTTGAAATGTGCATTATCAGTAGATGCCAGGATGTTAAGACACTATTTGCACCAAGTTGG
GTGGAGGAGAATCTCCAATCCCTTGAATTATTACAAGTTGAAAATTGTAGACAAGTGAAGGAG
ATAATTGCAGAGGAAGTTGTGGAATGTGGTCATTCTGAAGGAAAGGATGCTGTCATTAGCCTA
CCCCAACTTACGCGGCTAGTTCTGACTCTGTTGCCTCAAGTGCATAGTGTCTATAAAGGTCTG
CTAGTTTGTTCTTCACTTCTGTGGTGTACTTTTATGGACTGTCCAAAACTGAAGCGCCTTCCGT
TCTCCAACATGGATCGTCTAGAATGGATTGAAGGTCAAGAAAAATGGTGGGACTTGTTGGAAT
GGGATGAACCGGAATCCAAAGCTTCGCTCAGACCCTTGTTTAGATGCAAGTCTGTGGATGGTG
ATCGATAA
>SOV1g044450.1_protein-
SEQ ID NO: 341
MAHQIQIPIKMISIIANLFGIGRYHRGVPCDGGTLDNHQSELSSVLIQPQNKRRKVEEFLWFNTEY
VDRIIGWLKDSEIDTIGVYGMGGVGKTTLATQLQTRLLNHVVAWVSVGVDFTVYKLQQDIAGSF
GLDLQGDRDAIRRAAMISEFLCRNHNCVLFLDDLWGDFRREDVGIPRKCKLIVISRLLDVCRKLR
CKKVVKVEPLQEEESWQLFNRSIGYGVLNSVDVCRIRKLVYDKCVGLPLAITSLATSLRKMVDDD
NPSSWREVLENFDLLSAKQPHLEDTFSQLRLSYERLNNKLQRCFLYSALFPKGYAIRKEELIRVWI
GMELIDDVPSLQARYNMGHSILNKLVDSCLLETYDNDNIIKINDLVRHMALSIAGDSYMVEAGIPT
NFEFRENLRVVSLVNSSIPSIPSGASLIKCHCLSTLLLQHNSLEFIPESFFLHMRGLRVLNLSDTNLI
RLPSSIDALEELRVLDLSFCQNLKQVTSLSKLLKLQFLNLSQTGIGPAPRSLENLKSLTELNLSSIPE
PQKIPSGVLPALFRLKRLACYVVEAAIHELQNVNSLEVLDARFLNLCDLSSYVRSQHWCILESYHL
QVGFEVRSEQPYNRRVSLSGCSLTGQEGDYVVLPSNIQELYVDNCRDFRCLSDVLLPVAYRHRNC
QNGASVDSCNGEQAEVFAGLEMCIISRCQDVKTLFAPSWVEENLQSLELLQVENCRQVKEIIAEE
VVECGHSEGKDAVISLPQLTRLVLTLLPQVHSVYKGLLVCSSLLWCTFMDCPKLKRLPFSNMDRLE
WIEGQEKWWDLLEWDEPESKASLRPLFRCKSVDGDR*
SOV1g044450-cds-deletion-1-
SEQ ID NO: 342
MAHQIQIPIKMISIIANLFGIGRYHRGVPCDGGTLDNHQSELSSVLIQPQNKRRKVEEFLWFNTEY
VDRIIGWLKDSEIDTIGVYGMGGVGKTTLATQLQTRLLNHVVAWVSVGVDFTVYKLQQDIAGSF
GLDLQGDRDAIRRAAMISEFLCRNHNCVLFLDDLWGDFRREDVGIPRKCKLIVISRLLDVCRKLR
CKKVVKVEPLQEEESWQLFNRSIGYGVLNSVDVCRIRKLVYDKCVGLPLAITSLATSLRKMVDDD
NPSSWREVLENFDLLSAKQPHLEDTFSQLRLSYERLNNKLQRCFLYSALFPKGYAIRKEELIRVWI
GMELIDDVPSLQARYNMGHSILNKLVDSCLLETYDNDNIIKINDLVRHMALSIAGDSYMVEAGIPT
NFEFRENLRVVSLVNSSIPSIPSGASLIKCHCLSTLLLQHNSLEFIPESFFLHMRGLRVLNLSDTNLI
RLPSSIDALEELRVLDLSFCQNLKQVTSLSNLC┌ ┐ELQNVNSLEVLDARFLNLCDLSSYVRSQHWC
ILESYHLQVGFEVRSEQPYNRRVSLSRCSLTGQEGDYVVLPSNIQELYVDNCRDFRCLSDVLLPVA
YRHRNCQNGASVDSCNGEQAEVFAGLEMCIISRCQDVKTLFAPSWVEENLQSLELLQVENCRQV
KEIIAEEVVECGHSEGKDAVISLPQLTRLVLTLLPQVHSVYKGLLVCSSLLWCTFMDCPKLKRLPFS
NMDRLEWIEGQEKWWDLLEWDEPESKASLRPLFRCKSVDGDR*

### Example 4: RNA-Seq Analysis on the EMS22-20 Mutant Transcriptome Data

[0286] To get some insight into the resistance mechanism of the EMS22 mutant transcriptome data were obtained by performing an RNA-seq analysis. For the experiment, B11-509 and EMS22-20 were either mock-infected or infected with Pe:16 using a concentration of 1×10⁵ spores/ml. At different time points after infection (0, 4, 8, 24, and 48 hours post inoculation [hpi]) leaf samples were taken from at least three plants per treatment. RNA was isolated. In total, 20 equimolar bulks were analyzed. An RNA-seq data file of FPKM values was obtained. The RPS2-Like gene (SOV19044450) showed differential expression, with a higher expression in the EMS22 mutant than in the B11-509 background (FIG. 6). Visual inspection of two mock and treated pools revealed the same changes in mapping data of this gene. The RNA-seq results of B11-509 and EMS22-20 were used to analyze the expression level of spinach orthologs of known defense pathways (For example, SA, JA/Et, ABA, MAPK). This research shows that most of these orthologs are differentially expressed in the mutant. Our research thus indicates that said mutant shows a heightened level of basal resistance as many genes contributing to resistance (defense-related genes) are differentially expressed, such as PR genes (PR1-PR5b), chitinases, peroxidases, caffeate O-methyltransferases, aspartyl proteases, and MAPK3.

### Example 5: In Planta Resistance of EMS22-20 Line Against DM Isolate Pe:16

[0287] To get some insight into the resistance mechanism of the EMS22 mutant, detailed microscopic analyses were performed and the infection process of DM isolate Pe:16 on leaves of both B11-509 and EMS22-20 was followed over time using Trypan Blue staining. During the infection process in B11-509, penetration of the leaves by the appressoria and hyphae growth was already visible from day 2 onwards. In addition, it is believed that haustoria are formed. In case of the EMS22-20 mutant, it was clear that the downy mildew is not able to penetrate the leaf epidermis. Appressoria are formed, but the hyphae stay on the leaf surface, and often a cluster of spores and hyphae is observed (FIGS. 7 and 8).

### Example 6: In Planta Resistance of EMS22-20 Line Against Other Disease of Spinach

[0288] Diseases affecting spinach plants include, but are not limited to, anthracnose (Colletotrichum dematium f. sp. spinaciae), damping off/seedling blight (Pythium ultimum), downy mildew (Peronospora effusa), fusarium wilt (Fusarium oxysporum f. sp. spinaciae), Stemphylium leaf spot (Stemphylium versicarium, Stemphylium beticola, Stemphylium drummondii), verticillium wilt (Verticillium dahlia), white rust (Albugo occidentalis), black root rot (Aphanomyces cochlioides), and Cladosporium leaf spot (Cladosporium variabile). In order to determine if the resistance observed in EMS22-20 is broadly effective against other pathogens of spinach several disease assays are performed. Disease symptoms are evaluated on a scale from 1 (very susceptible/dead plant) to 9 (very resistant, no symptoms) for the lines carrying the homozygous causal mutations in RPS2-like gene (derived from EMS22-20) and other lines with the wild-type allele (including the untreated B11-509). Table 7 shows that the EMS-derived mutant allele of RPS2-like also provides increased resistance to Colletotrichum dematium f. sp. spinaciae, the latter causing antracnose on spinach, indicating that the resistance identified in EMS22-20 has a broad resistance activity beyond DM. The average disease score (24 plants per line) for plants carrying the resistant RPS2-like allele is “7 or 8”, compared to “3 or lower” in the B11-509, Viroflay and two additional susceptible varieties. Interestingly, the resistance score was also higher than that of Stanton (scored “6”) which is considered the state-of-the-art resistant variety for antracnose resistance in spinach. This research suggests that the EMS22-20 mutant S-allele results in a broad resistance against multiple pathogens and diseases common to spinach, and leads to the hypothesis that a similar resistance against further pathogens and/or diseases is to be expected.

TABLE 7
Results of an antracnose disease assay on spinach. 24 plants per line were infected
with Colletotrichum dematium f. sp. spinaciae and evaluated on a scale from
1 (very susceptible) to 9 (completely resistant). Lines carrying the mutant allele
of the S-locus (X20-010-1) were highly resistant compared to all other lines,
including compared to the best available variety (Stanton) in the market.
The homozygous presence of the mutated S-locus in the various lines is
indicated ‘Y’ = present while ‘N’ = absent. ‘Susceptible control line’
indicates that the line is known to be susceptible against Colletotrichum
(negative control), while ‘Resistant control line’ indicates that the
line is known to be resistant against Colletotrichum (positive control).

| | Homozygous | | |
|---|---|---|---|
| | presence of | Disease score (1- | |
| Genotype/line | mutated S-locus | 9) Colletotrichum | Comment |
| PV1028 | N | 2 | Susceptible control line |
| PV1369 | N | 3 | Susceptible control line |
| Stanton | N | 6 | Resistant control line |
| Viroflay | N | 3 | Susceptible control line |
| B11-509 | N | 3 | Susceptible control line |
| X20-010-1-12-5 | Y | 8 | |
| X20-010-1-13-2 | Y | 7 | |
| X20-010-1-13-3 | Y | 8 | |
| X20-010-1-13-6 | Y | 8 | |
| X20-010-1-13-7 | Y | 8 | |
| X20-010-1-13-13 | Y | 8 | |

### Example 7: In Planta Functional Validation of RPS2-Like Causing Resistance of EMS22-20 Line Against DM Isolate Pe:16

[0289] To analyze gain and loss of resistance, a transient expression assay was set up, as stable transformation in spinach was not achievable. Full length coding sequences of the candidate genes, both wild-type (WT) and mutant alleles, were cloned into overexpression (OE) construct pK7WG2, under the control of the 35S promoter. To check for expression levels in inoculated tissues, leaves and cotyledons of wild-type B11-509 and mutant EMS22-20 were inoculated with A. tumefaciens containing the OE constructs. Leaves from 3- or 4-week-old plants and cotyledons of 10-days old seedlings were used for transient expression of the candidate gens (via A. tumefaciens) and subsequently inoculated with Pe:16 for functional validation of the candidate genes. It is hypothesized that OE of the WT allele of RSP2-like in the EMS22-20 background (complementation) will restore the susceptibility of the EMS22-20 mutant to P. effusa, whereas OE of the mutant allele does not.

### Example 8: Syntenic Analysis of Spo10764 and Spov3_Chr4.04752 in Pea, Soy and Faba Bean

[0290] Spo10764 and Spov3_chr4.04752 (Sp75 gene model ID Spo25330) are candidate genes in spinach associated with downy mildew susceptibility.

[0291] Spo10764 is found on chromosome 1 (41,268,940-41,270,931) of the Sp75 pseudomoleculed reference genome (MO ID: 27091) and consists of a single exon.

[0292] Spov3_chr4.04752 is found on chromosome 1 (50,406,246-50,414,563) of the Sp75 pseudomoleculed reference genome (MO ID: 27091) and consists of 11 exons.

### Orthologues in Pea, Soy and Faba Bean

[0293] Genomic, CDS and protein sequences were provided for the two candidate genes. A preliminary investigation into potential orthologues was carried out with a simplistic BLAST approach. This was then followed up using the Synteny Analyser (available on galaxy-test.kws.de), which mainly utilises JCVI and was designed for analysis of cereals, but for the proposes of this task, was updated to include a wider range of crops.

### Pea-Spo10764

[0294] Reference genome=cv. Caméor v1 (MO ID: 28707)

BLAST results:

| | Coverage | | |
|---|---|---|---|
| Chr/Gene/Protein | (%) | ID (%) | BLAST type |
| KE_Cameor_v1.scaffold03758 | 53 | 66 | CDS −> Genomic |
| Psat0s3758g0080.1 | 53 | 66 | CDS −> CDS |
| KE_Cameor_v1.scaffold03758 | 53 | 66 | Genomic −> Genomic |
| Psat0s3758g0080.1 | 53 | 66 | Genomic −> CDS |
| Psat0s3758g0080.1 | 92 | 37 | Protein −> Protein |

[0295] Psat0s3758g0080 is found on scaffold_03758 of the pea genome and is the best fit from the pea gene model to Spo10764.

### Soy-Spo10764

Reference genome=cv. Williams82 v4 (MO ID: 28479)
BLAST results:

| | Coverage | | |
|---|---|---|---|
| Chr/Gene/Protein | (%) | ID (%) | BLAST type |
| Glyma.08G285350.1 | 54 | 67 | CDS −> CDS |
| Glyma.08G285300.2 | 54 | 67 | CDS −> CDS |
| SOY_Wm82_v4.chr08 | 54 | 66 | CDS −> Genomic |
| SOY_Wm82_v4.chr18 | 53 | 66 | CDS −> Genomic |
| Glyma.08G285350.1 | 54 | 67 | Genomic −> CDS |
| Glyma.08G285300.2 | 54 | 67 | Genomic −> CDS |
| SOY_Wm82_v4.chr08 | 54 | 66 | Genomic −> Genomic |
| SOY_Wm82_v4.chr18 | 47 | 66 | Genomic −> Genomic |
| ***no hits*** | | | Protein −> Protein |

[0296] Glyma.08G285350.1 and Glyma.08G285300.2 are both found on chromosome 8 of the soy genome and are the best fit from the soy gene model to Spo10764. The Synteny Analyser also identifies the orthologue for Spo10764 as Glyma.08G285300.2 in soy cv. Williams82, with default filter settings (syntenic blocks consisting of a minimum of 30 genes).

### Pea-Spov3_chr4.04752

Reference genome=cv. Caméor v1 (MO ID: 28707)
BLAST results:

| | Coverage | | |
|---|---|---|---|
| Chr/Gene/Protein | (%) | ID (%) | BLAST type |
| Psat4g115080.1 | 100 | 81 | CDS −> CDS |
| Psat2g093960.1 | 99 | 80 | CDS −> CDS |
| KE_Cameor_v1.chr4 | 26 | 72 | Genomic −> Genomic |
| KE_Cameor_v1.chr2 | 22 | 73 | Genomic −> Genomic |
| Psat4g115080.1 | 100 | 92 | Protein −> Protein |
| Psat2g093960.1 | 100 | 91 | Protein −> Protein |

[0297] Psat4g115080.1 and Psat2g093960.1 are found on chromosome 2 and 4 respectively and are the best fit from the pea gene model to Spov3_chr4.04752. Psat4g115080.1 and Psat2g093960.1 consist of 11 exons, which is consistent with the Spov3_chr4.04752 (Spo25330) gene model. The Synteny Analyser found Psat4g115080.1 to be a syntenic block with Spov3_chr4.04752.

### Soy-Spov3_chr4.04752

Reference genome=cv. Williams82 v4 (MO ID: 28479)
BLAST results:

| | Coverage | | |
|---|---|---|---|
| Chr/Gene/Protein | (%) | ID (%) | BLAST type |
| Glyma.18G143100.1 | 100 | 81 | CDS −> CDS |
| Glyma.08G283400.1 | 100 | 80 | CDS −> CDS |
| Glyma.01G027300.1 | 99 | 79 | CDS −> CDS |
| Glyma.02G037700.1 | 99 | 79 | CDS −> CDS |
| SOY_Wm82_v4.chr18 | 23 | 71 | Genomic −> Genomic |
| SOY_Wm82_v4.chr08 | 21 | 74 | Genomic −> Genomic |
| SOY_Wm82_v4.chr02 | 25 | 69 | Genomic −> Genomic |
| SOY_Wm82_v4.chr01 | 20 | 72 | Genomic −> Genomic |

[0298] Glyma.18G143100.1, Glyma.08G283400.1, Glyma.01G027300.1 and Glyma.02G037700.1 are found on chromosomes 18, 8, 1 and 2, respectively. These all consist of 11 exons, which is consistent with the Spov3_chr4.04752 (Spo25330) gene model. The Synteny Analyser identified all four gene models (Glyma.18G143100.1, Glyma.08G283400.1, Glyma.01G027300.1 and Glyma.02G037700.1) as orthologues found in syntenic blocks with Spov3_chr4.04752.

### Faba Bean-Spov3_chr4.04752

Reference transcriptome=V.faba_csf_roftrans v2-available at pulsedb.org

[0299] Faba bean currently has no genome available, but instead has a transcriptome of assembled RNASeq data. Therefore, it is suitable for BLAST analysis but not compatible with the Synteny Analyser.

| | Coverage | | |
|---|---|---|---|
| Chr/Gene/Protein | (%) | ID (%) | BLAST type |
| v.faba_CSFL_reftransV2_0011954 | 48 | 82 | CDS −> CDS |

[0300] Spov3_chr4.04752 returned a single hit in the faba bean transcriptome.

TABLE 8

| Candidate | | | | | |
|---|---|---|---|---|---|
| Gene | Genome | Gene model | Genomic | CDS | Protein |
| Spo10764 | Soybean | Glyma.08G285300.2 | SEQ ID NO: 316 | SEQ ID NO: 321 | SEQ ID NO: 326 |
| Spov3_chr4.04752 | Pea | Psat4g115080.1 | SEQ ID NO: 252 | SEQ ID NO: 271 | SEQ ID NO: 294 |
| | | Psat2g093960.1 | SEQ ID NO: 253 | SEQ ID NO: 272 | SEQ ID NO: 295 |
| | Soybean | Glyma.18G143100.1 | SEQ ID NO: 254 | SEQ ID NO: 273 | SEQ ID NO: 296 |
| | | Glyma.08G283400.1 | SEQ ID NO: 255 | SEQ ID NO: 274 | SEQ ID NO: 297 |
| | | Glyma.01G027300.1 | SEQ ID NO: 256 | SEQ ID NO: 275 | SEQ ID NO: 298 |
| | | Glyma.02G037700.1 | SEQ ID NO: 257 | SEQ ID NO: 276 | SEQ ID NO: 299 |
| | Faba | V.faba_CSFL_reftransV2_0011954 | — | SEQ ID NO: 277 | — |
| | bean | | | | |

### Example 9: Downy Mildew Resistance in Sunflower Plants

[0301] It is hypothesized that sunflower plants with altered functionality of the susceptibility gene (orthologous to SEQ ID NO: 4, 96, 172) or protein (orthologous to SEQ ID NO: 6, 98, or 174) will be less susceptible to downy mildew infection. In order to test this hypothesis, sunflower mutant plants altered in the expression of the S-gene (and translation of the protein) will be generated through gene editing technologies or via chemical mutagenesis. Subsequently, these mutants, homozygous for the mutant allele, will be tested in a bioassay to determine their level of reduced susceptibility towards downy mildew infection. The results will be compared to mutant plants that only have one allele mutated or plants with the un-mutated allele. More specifically, the bioassays will be conducted on seedlings of sunflower. The plants will be directly inoculated with one or more races (strains or isolates) of the pathogen Plasmopara halstedii. Alternatively, seeds will be sown, or seedlings will be transferred to potting soil that is mixed with infectious-soil (soil known to cause disease in susceptible plants). Level of susceptibility will be assessed in numerous ways. For example, by determining the number of germinating seedlings after sowing or scoring the percentage of diseased seedlings, determining the level of infection (disease class scoring) or the presence of the pathogen by diagnostic assays. In all of these assays, sunflower plants homozygous for the mutant allele will be compared to plants that have only one mutant allele (heterozygous) or only carry the un-mutated allele (homozygous wild-type). It will be demonstrated that sunflower plants homozygous for the mutant allele are less-susceptible to downy mildew compared to plants that carry the un-mutated (wild-type) variant.

### Example 10: Downy Mildew Resistance in Maize Plants

[0302] It is hypothesized that maize plants with altered functionality of the susceptibility gene (orthologous to SEQ ID NO: 4, 96, 172) or protein (orthologous to SEQ ID NO: 6, 98, or 174) will be less susceptible to downy mildew infection. In order to test this hypothesis, maize mutant plants altered in the expression of the S-gene (and translation of the protein) will be generated through gene editing technologies or via chemical mutagenesis. Subsequently, these mutants, homozygous for the mutant allele, will be tested in a bioassay to determine their level of reduced susceptibility towards downy mildew infection. The results will be compared to mutant plants that only have one allele mutated or plants with the un-mutated allele. More specifically, the bioassays will be conducted on seedlings, detached leaves or leaf discs of maize. The plants will be directly inoculated by rub inoculation or sprayed with an inoculum suspension with sporangia/spores with one or more races (strains or isolates) of the pathogen Peronosclerospora spp (e.g. sorghi, maydis, sacchari). Level of susceptibility will be assessed in numerous ways. For example by determining the percentage of diseased seedlings, determining the level of infection (disease class scoring) or the presence of the pathogen by diagnostic assays. In all of these assays, maize plants homozygous for the mutant allele will be compared to plants that have only one mutant allele (heterozygous) or only carry the un-mutated allele (homozygous wild-type). It will be demonstrated that maize plants homozygous for the mutant allele are less-susceptible to downy mildew compared to plants that carry the un-mutated (wild-type) variant.

### Example 11: Downy Mildew Resistance in Beta vulgaris Plants

[0303] It is hypothesized that sugar beet, red beet and Swiss chard (all Beta vulgaris species) plants with altered functionality of the susceptibility gene (orthologous to SEQ ID NO: 4, 96, 172) or protein (orthologous to SEQ ID NO: 6, 98, or 174) will be less susceptible to downy mildew infection. In order to test this hypothesis, Beta vulgaris mutant plants altered in the expression of the S-gene (and translation of the protein) will be generated through gene editing technologies or via chemical mutagenesis. Subsequently, these mutants, homozygous for the mutant allele, will be tested in a bioassay to determine their level of reduced susceptibility towards downy mildew infection. The results will be compared to mutant plants that only have one allele mutated or plants with the un-mutated allele. More specifically, the bioassays will be conducted on seedlings, detached leaves or leaf discs of Beta vulgaris. The plants will be directly inoculated by rub inoculation or sprayed with an inoculum suspension with sporangia/spores with one or more races (strains or isolates) of the pathogen Peronospora farinosa f. sp. betae. Level of susceptibility will be assessed in numerous ways. For example by determining the percentage of diseased seedlings, determining the level of infection (disease class scoring) or the presence of the pathogen by diagnostic assays. In all of these assays, Beta vulgaris plants homozygous for the mutant allele will be compared to plants that have only one mutant allele (heterozygous) or only carry the un-mutated allele (homozygous wild-type). It will be demonstrated that Beta vulgaris plants homozygous for the mutant allele are less-susceptible to downy mildew compared to plants that carry the un-mutated (wild-type) variant.

### Example 12: Downy Mildew Resistance in Lettuce Plants

[0304] It is hypothesized that lettuce plants with altered functionality of the susceptibility gene (orthologous to SEQ ID NO: 4, 96, 172) or protein (orthologous to SEQ ID NO: 6, 98, or 174) will be less susceptible to downy mildew infection. In order to test this hypothesis, lettuce mutant plants altered in the expression of the S-gene (and translation of the protein) will be generated through gene editing technologies or via chemical mutagenesis. Subsequently, these mutants, homozygous for the mutant allele, will be tested in a bioassay to determine their level of reduced susceptibility towards downy mildew infection. The results will be compared to mutant plants that only have one allele mutated or plants with the un-mutated allele. More specifically, the bioassays will be conducted on seedlings, detached leaves or leaf discs of lettuce. The plants will be directly inoculated by rub inoculation or sprayed with an inoculum suspension with sporangia/spores with one or more races (strains or isolates) of the pathogen Bremia lactucae. Level of susceptibility will be assessed in numerous ways. For example by determining the percentage of diseased seedlings, determining the level of infection (disease class scoring) or the presence of the pathogen by diagnostic assays. In all of these assays, lettuce plants homozygous for the mutant allele will be compared to plants that have only one mutant allele (heterozygous) or only carry the un-mutated allele (homozygous wild-type). It will be demonstrated that lettuce plants homozygous for the mutant allele are less-susceptible to downy mildew compared to plants that carry the un-mutated (wild-type) variant.

### Example 13: Downy Mildew Resistance in Plants of the Family Cucurbitaceae

[0305] It is hypothesized that plants in the family of the Cucurbitaceae (e.g., cucumber, melon, watermelon, squash, pumpkin, gourd and others crops) with altered functionality of the susceptibility gene (orthologous to SEQ ID NO: 4, 96, 172) or protein (orthologous to SEQ ID NO: 6, 98, or 174) will be less susceptible to downy mildew infection. In order to test this hypothesis, mutant plants altered in the expression of the S-gene (and translation of the protein) will be generated through gene editing technologies or via chemical mutagenesis. Subsequently, these mutants, homozygous for the mutant allele, will be tested in a bioassay to determine their level of reduced susceptibility towards downy mildew infection. The results will be compared to mutant plants that only have one allele mutated or plants with the un-mutated allele. More specifically, the bioassays will be conducted on seedlings, detached leaves or leaf discs. The plants will be directly inoculated by rub inoculation or sprayed with an inoculum suspension with sporangia/spores with one or more races (strains or isolates) of the pathogen Pseudoperonospora cubensis. Level of susceptibility will be assesses in numerous ways. For example by determining the percentage of diseased seedlings, determining the level of infection (disease class scoring) or the presence of the pathogen by diagnostic assays. In all of these assays, plants homozygous for the mutant allele will be compared to plants that have only one mutant allele (heterozygous) or only carry the un-mutated allele (homozygous wild-type). It will be demonstrated that plants homozygous for the mutant allele are less-susceptible to downy mildew compared to plants that carry the un-mutated (wild-type) variant.

### Example 14: Downy Mildew Resistance in Cucumber Plants

[0306] It is hypothesized that cucumber plants with altered functionality of the susceptibility gene (orthologous to SEQ ID NO: 4, 96, 172) or protein (orthologous to SEQ ID NO: 6, 98, or 174) will be less susceptible to downy mildew infection. In order to test this hypothesis, cucumber mutant plants altered in the expression of the S-gene (and translation of the protein) will be generated through gene editing technologies or via chemical mutagenesis. Subsequently, these mutants, homozygous for the mutant allele, will be tested in a bioassay to determine their level of reduced susceptibility towards downy mildew infection. The results will be compared to mutant plants that only have one allele mutated or plants with the un-mutated allele. More specifically, the bioassays will be conducted on seedlings, detached leaves or leaf discs of cucumber. The plants will be directly inoculated by rub inoculation or sprayed with an inoculum suspension with sporangia/spores with one or more races (strains or isolates) of the pathogen Pseudoperonospora cubensis. Level of susceptibility will be assessed in numerous ways. For example by determining the percentage of diseased seedlings, determining the level of infection (disease class scoring) or the presence of the pathogen by diagnostic assays. In all of these assays, cucumber plants homozygous for the mutant allele will be compared to plants that have only one mutant allele (heterozygous) or only carry the un-mutated allele (homozygous wild-type). It will be demonstrated that cucumber plants homozygous for the mutant allele are less-susceptible to downy mildew compared to plants that carry the un-mutated (wild-type) variant.

### Example 15: Downy Mildew Resistance in Additional Plant Species

[0307] It is hypothesized that additional plants, such as but not limited to, carrot, bean, rocket (arugula), basil, soybean, sorghum, impatiens, wheat, barley, rye, pea, faba (fava) bean, plants of the Brassica species (such as, but not limited to, Brassica napus, Brassica oleracea, Brassica rapa, and Brassica juncea), and plants of the Family of Solanaceae (such as, but not limited to, tomato, pepper, and eggplant) with altered functionality of the susceptibility gene (orthologous to SEQ ID NO: 4, 96, 172) or protein (orthologous to SEQ ID NO: 6, 98, or 174) will be less susceptible to downy mildew infection. In order to test this hypothesis, mutant plants which are altered in the expression of the S-gene (and translation of the protein) will be generated through gene editing technologies or via chemical mutagenesis. Subsequently, these mutants, homozygous for the mutant allele, will be tested in a bioassay to determine their level of reduced susceptibility towards downy mildew infection. The results will be compared to mutant plants that only have one allele mutated or plants with the un-mutated allele. More specifically, the bioassays will be conducted on seedlings, detached leaves or leaf discs. The plants will be directly inoculated by rub inoculation or sprayed with an inoculum suspension with sporangia/spores with one or more races (strains or isolates) of pathogen. The following crop/downy mildew combinations will be tested: carrot/Peronospora parasitica; rocket (arugula)/Peronospora erucastri; belbahrii; soybean/Peronospora manshurica; basil/Peronospora sorghum/Peronosclerospora sorghi; impatiens/Plasmopara obducen: wheat/Sclerophthora macrospora; barley/Sclerophthora macrospora; rye/Sclerophthora macrospora; pea/Phytophthora phaseoli; faba (fava) bean/Phytophthora phaseoli; Brassica species/Hyaloperonospora brassicae; and Family of Solanaceaea/Peronospora hyoscyami. Level of susceptibility will be assessed in numerous ways. For example by determining the percentage of diseased seedlings, determining the level of infection (disease class scoring) or the presence of the pathogen by diagnostic assays. In all of these assays, plants homozygous for the mutant allele will be compared to plants that have only one mutant allele (heterozygous) or only carry the un-mutated allele (homozygous wild-type). It will be demonstrated that plants homozygous for the mutant allele are less-susceptible to downy mildew compared to plants that carry the un-mutated (wild-type) variant.

### Example 16: Resistance to Phytophthora Blight Diseases that Cause Root, Crown and Fruit Rots

[0308] Reduced susceptibility to other oomycete pathogens, most importantly Phytophthora spp. will be determined in a similar manner. Plants homozygous for the mutant allele will be compared to plants that have only one mutant allele (heterozygous) or only carry the un-mutated allele (homozygous wild-type). It will be demonstrated that plants homozygous for the mutant allele are less-susceptible to Phytophthora blight compared to plants that carry the un-mutated (wild-type) variant. The following crop/pathogen combinations will be tested: tomato/Phytophthora infestans (late blight); tomato/Phytophthora capsici; pepper/Phytophthora capsici; eggplant/Phytophthora capsici; tobacco/Phytophthora nicotianae; and cucurbit crops (e.g., cucumber, squash, pumpkin, watermelon, and melon)/Phytophthora capsica.

### Example 17: Resistance to Pythium Diseases that Cause Damping-Off and Root-Rot

[0309] Reduced susceptibility to other oomycete pathogens, most importantly Pythium spp. will be determined in a similar manner. Plants homozygous for the mutant allele will be compared to plants that have only one mutant allele (heterozygous) or only carry the un-mutated allele (homozygous wild-type). It will be demonstrated that plants homozygous for the mutant allele are less-susceptible to Pythium diseases compared to plants that carry the un-mutated (wild-type) variant. The following crop/pathogen combinations will be tested: carrot/Pythium irregulare, Pythium violae, and Pythium ultimum; Swiss chard/Pythium irregulare, Pythium violae, and Pythium ultimum; and spinach/Pythium irregulare, Pythium violae, and Pythium ultimum.

### Deposit Information

[0310] A total of 625 seeds of resistant M3 spinach line ‘Nr.22-18’ were deposited under accession number NCIMB 43773 by KWS Vegetables B.V. on May 14, 2021, at the NCIMB Ltd., Ferguson Building, Craibstone Estate, Bucksbum, Aberdeen AB21 9YA, United Kingdom (NCIMB). Access to the deposit will be available during the pendency of this application to persons determined by the Director of the U.S. Patent Office to be entitled thereto upon request or by the expert solution according to Rule 32 EPC. Subject to 37 C.F.R. § 1.808 (b), all restrictions imposed by the depositor on the availability to the public of the deposited material will be irrevocably removed upon the granting of the patent. The deposit will be maintained for a period of 30 years, or 5 years after the most recent request or for the enforceable life of the patent whichever is longer, and will be replaced if it ever becomes nonviable during that period. Applicant does not waive any rights granted under this patent on this application or under the Plant Variety Protection Act (7 USC 2321 et seq.).

1. A method of reducing susceptibility to a pathogen in a plant, the method comprising:
Increasing or decreasing the activity or expression of a susceptibility gene (S-gene) encoding an RPS2-like resistance protein.

2. The method of claim 1 wherein said increased or decreased activity is by targeted DNA modification or by introgression.

3. The method of claim 2, wherein said DNA modification results in a sequence selected from SEQ ID NOs: 169 or 170.

4. The method of claim 1, wherein the S-gene encodes an RPS2-like resistance protein comprising an amino acid sequence that is at least 80% identical to the sequence of SEQ ID NO: 174.

5. The method of claim 1, wherein the plant is of the species Spinacia oleracea.

6. The method of claim 1, wherein the pathogen is of the phylum Oomycota.

7. The method of claim 1, wherein the pathogen is of the phylum Ascomyceta.

8. The method of claim 2, wherein the modification comprises and is flanked by SEQ ID NO: 241 and SEQ ID NO: 251.

9. The method of claim 6, wherein the pathogen is of the species Peronospora effusa.

10. The method of claim 7, wherein the pathogen is of the genus Colletotrichum.

11. The method of claim 10, wherein the pathogen is of the species Colletotrichum dematium f. sp. spinaciae.

12. A plant with reduced susceptibility to a pathogen comprising one or more nucleotide modifications at a genomic locus of the plant, wherein the genomic locus comprises a modified susceptibility gene (S-gene) encoding an RPS2-like resistance protein when compared to a plant without the modification.

13. The plant of claim 12, wherein the one or more nucleotide modifications result in increased or decreased expression or activity of a protein encoded by the S-gene, optionally wherein the one or more nucleotide modifications comprise an insertion, a deletion, or a single nucleotide polymorphism (SNP).

14. The plant of claim 12, wherein the S-gene encodes an RPS2-like resistance protein comprising an amino acid sequence that is at least 80% identical to the sequence of SEQ ID NO: 174.

15. The plant of claim 12, wherein the one or more nucleotide modifications result in a sequence selected from SEQ ID NOs: 169 or 170.

16. The plant of claim 12, wherein the plant is of the species Spinacia oleracea, and the pathogen is of the species Peronospora effusa.

17. The plant of claim 12, wherein the plant is of the species Spinacia oleracea, and the pathogen is of the genus Colletotrichum, preferably of the species Colletotrichum dematium f. sp. spinaciae.

18. The plant of claim 12, wherein the genomic locus comprises and is flanked by SEQ ID NO: 241 and SEQ ID NO: 251.

19. A plant cell, a seed, a progeny plant, plant part, or plant variety from the plant of claim 12.

20-38. (canceled)

The application's sequence listing, which the Patent Office published only in electronic form, follows.

SEQUENCE LISTING (342 sequences)

SEQ ID NO: 1 - DNA, 7252 bp, Spinacia oleracea
  source 1..7252: mol_type = genomic DNA
atgtcgggagcggcctcagcgctgttccttttagacattaaaggtagagttctcatatggcgggattatcgcggtgatgtttcagcggttcaagctgagaaattcttcactaagttcatcgagaaagaggtttttctgatctatctatttagcttttctttttgttaatttgtttttgagttgaatgaagtttaattttgatttttagttgtattgctttggtttgatctgattgaaattgagattgtttgcatttttgaatgtttgatgtggataatttacgtttattttagttgttttactggcgtttatgcgtaatttggggttttaagttgagcttttttcaacaataaagcttgtgttttcgctgttttatgagaactagatcccaattggaacggtgtagtttgaattggttaatgtaacttatgcttgaatagttgaatgaaattgagaatttggtccaattaggaatccgatggcactttcaagatcgcttgcagatatcattttctcctgctagcagtgttagattggtaatgcacattgttgctcatctgtgattgtgtgtcaataattgtgaattgggattgaataatcagaatgatgatttttaatcttattggctggtaagctggttcctttgttttatcggattgtgagaaagttttgtgtttgagatcttcgggcggttttgtgtagtgatgaatgttactcggagtttggacaaaggattttctggggctgttcgaaaattccaacttgacacaaggattagattatgtctgtaggtttgtttgaagtgtccaagagttaagacactaaattatgtgaggaatttgcacttatttgacgcaaaacaatagattagtttatctccccgagtgaaccaaaggatcatctcttgggggaactttttgttttccttgactaattgaggggtctttttggtgattttccctaactactacgaggcatttttggctactttaccctcctttggaatggtctctttgtccaatctgtatgagtgggcaagggtttctatataagtggttatacatcacaccagttcatagtaaatgagtattttgataacctgtatctctgtctttcttttggcatgcctggtagatggatctcactttttacttttgccattggtgcatgtttcagggtgatccacaatctcaggatccagttgtgcacgataatggggttacatacatgtttatacaacacaacaatgtgtatttacttattgctacaaggcaaaactgcaatgctgctagtcttattctctttcttcaccgtgtagttgatgtaagctccattggtaatcattgtacattggtttatattccatgttcatctttctgttcctgtatgatttccatctttcctttgtcaaagatctgccctctttaattgatcctttatctgggaatgactttcctatgcaggtgttcaagcattattttgaagagctagaagaggaatctctaagggataactttgttgtagtggtaagaggtattttctctctacttaagacgatactggtaaagttgagattgatgcactgataatatgcctcatctgcagtacgagttacttgacgaaattatggatttcggttaccctcagttcacagaagcaaagatcctgagtgagtttattaaaactgatgcttataggatggaagtcacacagaggcctcctatggctgtgataaatgcagtttcatggcgtagtgaaggaatatcttacaagaagaatgaggtgagtttgggtttctatttttttattagctttgtcaacccggaaacattaaagcacttctcctattttttacaggtattcttggatgttgtggagagtgtcaatatacttgtaaacagcaatgggcaaatcattagatcagatgttgttggggcattgaagatgagaacatatttgaggtgcactaaatgcccttcattttgtttgccttattttccttcagcaaaataagcccagatttattgcccttattatgttacaacaatgcatcactaaatcatcccttctttggatggaaaggatggggtggggtaaaaatctgggattcttgtttacagaactaaaataagatcaaagtcgtcgaactgtcaatacttctttttttttgaggggaaaagtaagctagtgtattattcaagggacgaattgttcaatgttacatacgaggcgatctcttggggacaatgattttcccaaatttgttcgacgccaaaaggaactagcttagcaaggtgatgagccaaagtgttgccgtcccttcttacatgagaccaatttatggaattaaaatgagaacacaatgacataatatcattcaaaacagaatccaagtcagagaagtacactgcacccttcgaaagtcggttgatcaatatttggcagtcggacagaatccaatttcatgttataaagtctaaaagtagcttatgcactgttttgcgcccaagctatggtttcaagaacaggggaaatgtagggaagagaaaataatgacaggttctgcttattaatgattcttttctgtgtgtcatgtgcgcatttgtggttgattgtgaaactgatcctttttctttttcttggatggtgggaggggggggggggggggttgtagttcttgttcagttagtatcacatgcatttatactattaacaagtgtggttcttgatgcatcgcttttatttttctataactctaacgttgcttttttaattgtaaagttagtatccatactgcttatctatcatccatgatattaaagatactctgtattttctctccagctttttagtgtaacaaacacccaggagtgtcatctcctttggtgcaaaatgtataaaatattgaatttaattgattaacccttgaatttcaaaacttctttttaccatttgagctctcggtggttacacactaaaatttggtgttctttatgtcagtgggatgcctgaatgtaaactaggcctgaacgatagagtattactggaggctcaaggacgaactactaagggcaaggctatcgacctggacgacatcaaatttcatcagtatgtttaaggctgagttgtagtagctacatttgctgctatttgtgatttgttatgttgatagtctgtaggttggaaatatatttggtatgatctgcttgatttattgaccatgcttcccttttgctataggtgtgtacgtttagcccgtttcgaaaatgataggaccatatcatttgtaccaccagatgggtcctttgatctcatgacatataggctcagtactcaggttcactgccaactttccatttttccctgaagacatcacataataatcctttcttcttttataatgatttggaattttggatgttgttttacttcaggtgaagcctctgatttgggttgaagcccagattgagaggcactccagaagtcgtattgagataacagtgaaatcaagaagccagtttaaggagcgaaggtatggctttaataatgttttatctattgctcagtcatgtcttttgcattatttttccctctgtttaagtgtaaactgtacattatctaagctttctgcttatcgggtccaattctgtagcactgcgacaaatgttgagattgaactgccagtgcctgccgatgccaccaatccaaatattcgcacgtcaatggggtctgctgcttatgcacctgagaaggatgctttagtctggaagataaaatctttccctggtggcaaggtaacaagtcgggatatcaagctgcctttttatgccatacctctaatccaatagggatttgcatgtaaatatgctgtcaattgtccttgaattctttgtaatgaacactttcaggaatacatgttgagggcagagtttagtcttccgagcatcacaagcgaagaggcaactcctgaaagaaaagctcctatacgagtgaaatttgaaatcccatattttacagtttctggaatccaggtttaaatcttatgagcttctttttaaatgcagtaattcctttccttgcatcatggtctggctcttagttgctaattgctatgtcttttgcttggcttgtgagttgtgagttgtgattagtatctttagtctttaggttaaaacggagacatcgggaaatataaaaatagagtacgtattactgtaggattttcttttgctatatctgtcttttttgtttaggctagtgatatgcttaggcaaatagaaaacttagtaataagttatatttccttctctacgtcctgatcacggatgattgtctatgttcaatttgtcaatattttaaatttttatgaactagcactgtagctattgtgatagtatcattgccacaataactgtcattacattatcactgagagtgatggactgctgtatctaatattatcaatccctccatacactattaatattgagctagtaatttctgattattagaatctgaaaaaccttttctctttctgttttctttttgggctcatactccctccgtccctttttgattgccccatatccaaaaaaaactttattaagaattcggtgtaaaatgtgcacacgagttgataaagtgggcccttgaggagagagggagaggggaagagggagagggagggagagcaagggagagagagagagagggggtatggcgggaaaacaacctcaaggggacaccctaaagaagaggaatatggggcaaataaaaagggacggagggagtatatagtaaggtttcattttgacgatttggttcagtgtctggaaccagaattaaatgtgcagaattggcttctgttggttattttttgtcctattatgtttctgttgggtcatctttctgtgtctccaccccatacaaaatagtgccatctgtaatggttactttgatgtttagaatgtcagaaaactttgcactagttccgtttcttttctggagagtagtctggtaattgttggtggtacaatgatatgcattgaagttgggaacagtaactggtatatcagtatttttgtagaaagaagccaatgaaagtgattagacttaggatttggatttatcagtgattgatgtagcttatggtttgatcccgcattcaagtttgtacctttcccaatttccaaaatgagttccccacatcatctggaagtctaatggtcctatactcctatcaaggcttcttgtcgttgtgtgttcacctattggtaggaaattgtttgtacatgctgtagttgtacagaggatgaagagttagtttgtcattgtagtgttaacagccaggtaagcaagaagttgttcaagtggcatggaaaaataggaacaatcgaaagtaatttcttagatttgaatctgagttcctattgcaattgtagtgcatatgcaagaaaaggaagaagcaaatgttttaggaacaagctctgtcacgtcccaacttttatgttcttttcagagttttggggttctgaacttctgggattggataagtttacaagttgggtctcttttaggtgaaggttatattttttgtttatggtttcgggttgactcaactaaattaaatttttgtgttaaatgaccgcttagagacttagacttatttttgttcaattaaagccatttctattctacaccattgaaaaatgaaaataaacgtcgtaagatgattgctggcttcttgtaagacatcattcatcaacgtcaaatgaaatttaactgacttagatacaccattttacacatttttaatgcaagtaaaacattcaaacgtgagacaaaatatcacatactgaccaagttaattcaaatttcaacattagaaaacatacttatgtgagaagatcaacgtcattttaaaacaaaatactctagaccagcataagttacttcatctaactctagaaaatcaaaatgcccttccacacaactacatcctgcaatgcaatccaccctgactcaagaatttgtagatagttagggtttgggtactcgcgggtttcagtaaaggaaatgctgttcaaacccttctttcatgtcagttttagggttgggtctctggtcatgtctttgttcttacatgcctagttaaagccaagtgattttttatgagcagcattgtaaaagttgtaatggtgccactggggatgaaagagcttgtttgtggaactgaactgacatgtaattatgataaataaatggatgtctgttgcttaggcaaatatactaatgaatgatagagaagtgcatatcccatcaagggttgggtgtagatagccagccaactataagatggaaaccagatattttcatacttgatggttaaccttattgttgatcatgtatactgtttagttgctctttgtgatagatagtttcgcgctctttccaaaaaggtccgctatgtattctctgtgaatccatcccaagtgctcaagtatccatatctccatatgaaatacaagtacaaagtataaactttggtgtatcccggagaaaagtaagaggacaagttagttcaatattcgagaagccaaagtcaaaaatagtgttcttcacaatcctggtaagggttgggtgtagatagccaactataagatggaaaccagatatttgttccagtcaaaaatagtgttcttaatcctggtaagtggatattatgattaatatctggtcgtcttcataagagtaatattgttaccttatcttgtagtaaccactaaccagaactagatgtccatggtctataactctatccctgcatgttgctgtttgttaatttctgaattggctgatctcttgaatttttagggtttatatcttcagtgttagaattaatttccattttctgactaatttggcccttcttttttttttgttttttttgtctggtttttttactgtatttcctactgtcagttttgattactgtattcagtcctattgtcagttttgattactgtattcagtcctattgtctgttatacttccttgtttggtgtgcagttttatttctttattagctctgctaattgttctttgagctcaaaacagttgtgatgactattaatctgtaatattcaatctgcaggttcgttatcttaaaatcattgaaaagagtggatatcaggctcttccatgggtgaggtacataacaatggctggcgaatatgagctgaggttaatgtga

SEQ ID NO: 2 - DNA, 1287 bp, Spinacia oleracea
  source 1..1287: mol_type = genomic DNA
atgtcgggagcggcctcagcgctgttccttttagacattaaaggtagagttctcatatggcgggattatcgcggtgatgtttcagcggttcaagctgagaaattcttcactaagttcatcgagaaagagggtgatccacaatctcaggatccagttgtgcacgataatggggttacatacatgtttatacaacacaacaatgtgtatttacttattgctacaaggcaaaactgcaatgctgctagtcttattctctttcttcaccgtgtagttgatgtgttcaagcattattttgaagagctagaagaggaatctctaagggataactttgttgtagtgtacgagttacttgacgaaattatggatttcggttaccctcagttcacagaagcaaagatcctgagtgagtttattaaaactgatgcttataggatggaagtcacacagaggcctcctatggctgtgataaatgcagtttcatggcgtagtgaaggaatatcttacaagaagaatgaggtattcttggatgttgtggagagtgtcaatatacttgtaaacagcaatgggcaaatcattagatcagatgttgttggggcattgaagatgagaacatatttgagtgggatgcctgaatgtaaactaggcctgaacgatagagtattactggaggctcaaggacgaactactaagggcaaggctatcgacctggacgacatcaaatttcatcagtgtgtacgtttagcccgtttcgaaaatgataggaccatatcatttgtaccaccagatgggtcctttgatctcatgacatataggctcagtactcaggtgaagcctctgatttgggttgaagcccagattgagaggcactccagaagtcgtattgagataacagtgaaatcaagaagccagtttaaggagcgaagcactgcgacaaatgttgagattgaactgccagtgcctgccgatgccaccaatccaaatattcgcacgtcaatggggtctgctgcttatgcacctgagaaggatgctttagtctggaagataaaatctttccctggtggcaaggaatacatgttgagggcagagtttagtcttccgagcatcacaagcgaagaggcaactcctgaaagaaaagctcctatacgagtgaaatttgaaatcccatattttacagtttctggaatccaggttcgttatcttaaaatcattgaaaagagtggatatcaggctcttccatgggtgaggtacataacaatggctggcgaatatgagctgaggttaatgtga

SEQ ID NO: 3 - protein, 428 aa, Spinacia oleracea
MSGAASALFLLDIKGRVLIWRDYRGDVSAVQAEKFFTKFIEKEGDPQSQDPVVHDNGVTYMFIQHNNVYLLIATRQNCNAASLILFLHRVVDVFKHYFEELEEESLRDNFVVVYELLDEIMDFGYPQFTEAKILSEFIKTDAYRMEVTQRPPMAVINAVSWRSEGISYKKNEVFLDVVESVNILVNSNGQIIRSDVVGALKMRTYLSGMPECKLGLNDRVLLEAQGRTTKGKAIDLDDIKFHQCVRLARFENDRTISFVPPDGSFDLMTYRLSTQVKPLIWVEAQIERHSRSRIEITVKSRSQFKERSTATNVEIELPVPADATNPNIRTSMGSAAYAPEKDALVWKIKSFPGGKEYMLRAEFSLPSITSEEATPERKAPIRVKFEIPYFTVSGIQVRYLKIIEKSGYQALPWVRYITMAGEYELRLM

SEQ ID NO: 4 - DNA, 7252 bp, Spinacia oleracea; identical to SEQ ID NO: 1
  source 1..7252: mol_type = genomic DNA

SEQ ID NO: 5 - DNA, 1287 bp, Spinacia oleracea
  source 1..1287: mol_type = genomic DNA
atgtcgggagcggcctcagcgctgttccttttagacattaaaggtagagttctcatatggcgggattatcgcggtgatgtttcagcggttcaagctgagaaattcttcactaagttcatcgagaaagagggtgatccacaatctcaggatccagttgtgcacgataatggggttacatacatgtttatacaacacaacaatgtgtatttacttattgctacaaggcaaaactgcaatgctgctagtcttattctctttcttcaccgtgtagttgatgtgttcaagcattattttgaagagctagaagaggaatctctaagggataactttgttgtagtgtacgagttacttgacgaaattatggatttcggttaccctcagttcacagaagcaaagatcctgagtgagtttattaaaactgatgcttataggatggaagtcacacagaggcctcctatggctgtgacaaatgcagtttcatggcgtagtgaaggaatatcttacaagaagaatgaggtattcttggatgttgtggagagtgtcaatatacttgtaaacagcaatgggcaaatcattagatcagatgttgttggggcattgaagatgagaacatatttgagtgggatgcctgaatgtaaactaggcctgaacgatagagtattactggaggctcaaggacgaactactaagggcaaggctatcgacctggacgacatcaaatttcatcagtgtgtacgtttagcccgtttcgaaaatgataggaccatatcatttgtaccaccagatgggtcctttgatctcatgacatataggctcagtactcaggtgaagcctctgatttgggttgaagcccagattgagaggcactccagaagtcgtattgagataacagtgaaatcaagaagccagtttaaggagcgaagcactgcgacaaatgttgagattgaactgccagtgcctgccgatgccaccaatccaaatattcgcacgtcaatggggtctgctgcttatgcacctgagaaggatgctttagtctggaagataaaatctttccctggtggcaaggaatacatgttgagggcagagtttagtcttccgagcatcacaagcgaagaggcaactcctgaaagaaaagctcctatacgagtgaaatttgaaatcccatattttacagtttctggaatccaggttcgttatcttaaaatcattgaaaagagtggatatcaggctcttccatgggtgaggtacataacaatggctggcgaatatgagctgaggttaatgtga

SEQ ID NO: 6 - protein, 428 aa, Spinacia oleracea
MSGAASALFLLDIKGRVLIWRDYRGDVSAVQAEKFFTKFIEKEGDPQSQDPVVHDNGVTYMFIQHNNVYLLIATRQNCNAASLILFLHRVVDVFKHYFEELEEESLRDNFVVVYELLDEIMDFGYPQFTEAKILSEFIKTDAYRMEVTQRPPMAVTNAVSWRSEGISYKKNEVFLDVVESVNILVNSNGQIIRSDVVGALKMRTYLSGMPECKLGLNDRVLLEAQGRTTKGKAIDLDDIKFHQCVRLARFENDRTISFVPPDGSFDLMTYRLSTQVKPLIWVEAQIERHSRSRIEITVKSRSQFKERSTATNVEIELPVPADATNPNIRTSMGSAAYAPEKDALVWKIKSFPGGKEYMLRAEFSLPSITSEEATPERKAPIRVKFEIPYFTVSGIQVRYLKIIEKSGYQALPWVRYITMAGEYELRLM

SEQ ID NO: 7 - DNA, 8589 bp, Beta vulgaris
  source 1..8589: mol_type = genomic DNA
tttttttttttgaaaagatctcccctcaaaattttaatttccctattattcttttatttgaatcatcgccacaaagtacaccactatagtaaggatcagaaatccttgatatacttctcaaactcgagagcttcaaattgctctctaatggcgtaaaatagaattcccaacaaaaaggagttatcaaaatttacttgtacaccattcttcaattttaaagcgtcaaataatagaatttgccagatccccatttccttctccttcttcttcctcactgatctgaatctcttaattttgaaatattaggagaaataaaatttttctagggtttctgctgagtttaatcgatcgaagaaatcatgtcgggagcggcctctgcgctgttccttttagacataaaaggtagagttctcatatggcgggattatcgcggcgatgtttcagcggttcaagctgagagattcttcactaagttcattgagaaagaggtttttgctgatctatctttttcaattctgtcttaaattgaagtttaattttgttttttagcagtattttctggttgatctgatcatattgaggctttttgcaatcttgaatgattaattcggatgtgtctgtttcatatttatgcataatttggttgtgtgatgggcttattttgttaggaaagcttgattctccttgttgtatttgatatagatcccagtttggataggtgtactttgaattgggttacagtgatttatgcttgaatgaaagtgagacatctgatcgaattaggaaatgagacgtgatcatgaggttctatgatcttttgaagatgtagcaatttgctcacattgtttgattggtggcacacattgtcgtttatctttacatgttattgtaagtcaatgaatttgaattgagtttgaagaattcgaatgattttctgtcgtttgggtgggttctgttcatctgttgtttaatctaattgtgaattttttatatatctgagtattttggggacaatgtataatgatctatgttatttggagctcggacaagggatttggttgtgttgtttgtaagttccagcatgactatttacttggagttgatcattattgtgattatagaattgtttgaagtgtcaaagtgtgttaacatactaaagtttgtcggagataaaagttgacactaagtggtatagagaaataaatatgatatcttcggaggtggactaaaatgcaacatattcggatttgtggttattttggtttcccctgactaattgagggattattggggatttatctgactaataggttggatctgtgaccatttttgatgcctagaactgaactcttttgtacagtctctaagtgtagccaacagatttttctctaagtgccgatgtgccacagcagttgatacttcatagttaaagattgtttgctcaagtttttcttttgtgtttactataaactgcctaattcttttatgcctggtagatggatctcactattcatttttccgattgatgtatttttcagggggatccacagtcacaagatccggtcgtgcacgataatggtattacatacatgttcatacaacacaacaatgtgtatctacttattgctgctagacaaaattgcaatgctgctagtcttcttctctttctccaccgtttagttgatgtaagctccattactgatcattgtacattgttctatgtttggtgcattagtatcttctgtttctgtatgttggtcttcctttgtagaaggtctgcatttcttagtagatcctttatatgggagcaacttccttgtgcaggttttcaaacattactttgaagaactagaagaggaatctcttagagataactttgttgtagtggtaagaggtattttctctctacttaaacaatactggtatagtcgagattgatatggctgatacaatttgttatctgcagtatgagttacttgacgagattatggatttcggttaccctcagttcactgaagcaaagatccttagtgagtttattaaaactgatgcttatcggatggaagtcacacaaaggcctcccatggctgtaacgaatgcagtttcatggcgtagtgaaggaatagcatacaagaagaatgaagtaattttgaattcctaggatctcatttttcttgaaagcattgtaacctgcaaatattgaattgcttcttcctttcgttacaggtattcttggatgttgttgagagtgttaatatacttgtaaacagcaatgggcaaataattagatcagatgttgttggggcattgaagatgagaacgtatttaaggtgcattaaatgacattatgatctgccttatttcctttcagcatagttaaaaaaatcagctcaaatttttgtttccataagaaactttgagcatttaagtgtaagcatattgcccttagaacattcacacaacagttatgctttagtaatgtattgctattcaatccgtctttgttggttatatttatatttttggatcagaaggggtggggttgttaatatattatcttactgtttgcatgatatttctgtatcttgagtctgatagaattagaataaggtcgaaaggtcagatattgctatatatgtgttataccctgaattttgttacaatatgtctgcgggaattttgtactgactgttatattttttttattgatccttgtagtcacatcttctaagtttaatattagcttgagcatccttaaaggggcgtttggtttgaaaatttcaggtatttatttgaaatggctaaaacccataccccaccctatgaaccaaaggctctccgaagtatggtttctagaacagagaaatggatgggagagagaaaatctatgacaaagactgctcattaataacttttatatcttgtaggagtttgactgttttgtggctaagtccgaaactgattctttgtcttttcctggggggtggagggtttgcaatgtttgtttagttagtgtgacatcaaccaacaagagggacttttggtacatcgcttagttcttctgtgatgaatttctatcactttattttgatgatgcatttagtctctgcactgcttgtctactttcctatgaattagggaagctctttaatatccctaagattaagggtttctttttatatttatccagctcctgttatgtaacaaatctaggaagtcagcccttggtgtaaaatgtctatctttgttcaacaacttgttaatgacaaattcccttgtacaaacttgacccttagctgttagatgttacatactaattatccaatattatctgtcgcagtgggatgcctgaatgtaaactaggcctgaatgacagagttttactggaggctcaagggcgaactactaaggggaaggctatcgacctggacgatattaaatttcatcagtatgtccatgactaagttgtgataactacttttgctactactcgtggtttatgttaataatttgcaagtgggtaatgtgtttcgtaagttctttattgagcttgctatcgtctttgctataggtgtgtgcgtctggctcgttttgaaaatgataggaccatatcatttatacctcctgatggatcctttgatctcatgacatatagactcagtactcaggttcacttctatgtttttctgcactccctctactgctttgcctcttttctaagacaggacatatcctttctccatttataatgttctggatgtaaccaaggatgtcttggcctagtggttaagattgaggtactgtgaactataggtcacaggttcgaatcccccatccccttctttgtactttgtactgccatcgtggctcatatgaatcaaaaaaaaaaataatgttctggatgtcgttttgcttcaggtgaagcctttagtttgggttgaggcacagattgagagacactcaagaagtcgtattgaaataatggttaaagcaagaagccagtttaaggagcgaaggtatagctataattatgtttctacaggtcaatgatgtatcgtggcttttttttttcttctaaatggtgtacttccttgctctttttctgttgcaacatatgagatttcatgcttcccaatgcacaagtttaaccattaatatctctaattatgtttcgttaaaattatagaaagttgatattttggatgtatatattgagtcgaaactaacaagactgcatatgattatgtttttccttatgtaaaaatcatcatagatgaacggaagagttatttatctgtgtaaactgtatgctatcttaattttgtgtctgtatggtccaactctatagcactgcaacaaatgttgagattgaacttccagtgccagctgatgccaccaatccaaatattcgcacatcaatggggtctgcttcttatgcccctgagaaggatgctttagtttggaagataaaatctttccctggtggcaaggtagattttttattttattttttaagctgcctttattatttttacgtctaatctcatgctttgcaaatatatactccctccatttctcgtagttcatctcactttccatgttcatcttttcttcgtaattcctccttttaatttatgtaaacttttattttcctcttttaccctttcttgccgtaccacattggttctcttggttctttaattattcatgtctccaaaaaaatttctttctcttatccagaagttgaaaaagaccaattttcacattcccccacattcttcttggtttctggtgctataataagtaggagaactttgaggaatagagggagtattttattttctgcaatatgtccttgaatttttagtaatgaacaaatctcaggaatacatgttgagggcagagttcagtcttcctagcatcaccagtgatgaggcaactcctgaaagaaaagctcctatacgtgtaaaatttgaaatcccgtatttcacagtttcaggaatccaggtatcaaatgttatgatgatttgtaaaaagcatgcaaagtttcttatacttgtatcatggtctggcatcctgttttgtttgcttgtgactccttgtatacttgggcaaagaaggatctatagattgccataataatagattacacagttttctggtctatatttgcgcatctaacttgttgcctggcttgtgacttcttaaatatctaggcaaaggaggagatattgattttcatcacactagtttatacaattactagctttctaatctgtgaatggacacgctaaaatatacttccgtctgttctttgatatatatctagtattaattagcaattgtaaatggcacaaagtttaggattagctaatagaaaaaatatctaattgtattaaacccatcacccatgtgatgcattaaaaagtaagaagtggtagaagtattgataaaggtaagagaggattggtagaagtattgacaaaagtaacacatagaaggtggattagtgaggcctcaatatacctaaagagaaatcatagaagtatttttaaatagcctaaaaaagatatatggtagaagtattaaagactagtgggagtaataaattgtacttcctttgttttgcaatttaaaaggtagtacgctactactttaaggctataaaaggtatccattacttataattataatcatattctaaattaaataaaatttaagtatcatctcatacgaatcttaattctatagaaaaagttaatcctaattgtattccaaaatagtgaaaattttacctatattaaattcttgatttttcaaaaaattttgacaaaattatattggatagaaaattttgtacttctaatattttcaagaacataaataaaatttttacgattgtcaacacacaactttaatatatttaattatgagtaagtgataatcataagaagctaatatttcgaaaatataagttaaaacaaatctaacaagattcatgtgatttttatttttccttatgataaaacattaatgatggtcaaagtgaagtatgtgaatagtgtcaaagtacaaagtgtgtagattaaaaagaaatggagggagtacttttcaaactgattgtaataaagcaaccatcaatttactcaactttatcatataagtttattgtatgttatatcctaaagtctatatgtatatatatatataatcccaaactcaaatattataaaatcattaaattttgacatggctcacttagttggcgcactttgtatgctcatgaaagtcccgctaatagatagatataaagattgtatatatttctttttattttgatcgtggatgttcttctatgtttaatctatcggattataataatttaagatatagctcaatgtgattattgtgatatcattactagtgcaagtcattgccatcattctttcatgcctcccttgtagttggactagtgaaagtaagtgttgctacattggcttcatgaggattgctgtgtctattattaaccatcctttcacacatgacttgcctagttgccttaaatatattatgatagtaaattttgattatgtggaatctggaaaagttcaattttatttctgtcatcttcttcggcgtgaatcatattcagtaaggttctttttagtgtcatttgtctggaaccaaacttgaaaatgcaaattggtttcttttggttattttaattttatttttttcttcatttgacttttgacctcataaaatatatttgatttgcaacatggtcagaatattagaaaactttttggattttgataatttagcttgagttgaaagcattattctagatggccgttggtctgatagattcttgacactgcagaaactctatgtatgtttggttgtgagagttgataatgatataatgataatatgatatgctaggaatttggaaaaaataagtggagcagtggttttgtaaagagaaataaatgaatgtatatggactatggattgaggattaggactatcctatttgtttctgttgaatctgaaggagagactttataaagggtagttaaagaacaggatgaaagttatacgtccattaaacaagaaagacatgaggctttacggcctgtttggttagtggtcataaattgtggtagatttattgtaaatttgtaaagaaattctaatatcaatacccatggtaatgaaatttcccacaaaacatgagtttttctttataaatttccattcagacccaaaaccacattcccaagtggtaatggatgttaatgaaattataggaagaaaatagatgtttgggatgtgataacattgccatgggtaatgctatgagatttcctatacaaagttatactactatgaattaccattatcacgatttataaccactaaccaaacgagccgttagtagttagtatactgattctccaatgtgtccatatctcatatgagatgtaatttgagggatcgtgtaaaataaaaagtaattgaacaattttttaagaattcaagtcaattgagaagcaaaagtcaaagagatttggtctaaaaccttgtaaatggactttttttttagatggagggactaatatcagtagggctgttcataatgatctgatccaactaacccgatccgcaatccgaattatggatcgcatcggataatcgaaatgaatagccctacataatatgtgaatccctaattccataaattcttcatatgtaagatttggtcattatctttatatcccattaacatggcaccatttattattttttaaaattgccttaccttgaattttaggtgattaaccttagccttaaaattgattattgcctttttttactcatttggtctaagttctgctctcttctgcctagttattgctgttctactgtcatgtcttttactggttctcatccctgtttggtgtgtgcctctgttttgtttattgctctgattaatgtcttttgaacttaaagcagtcatgatgatcataaactttgaatttttgatctgcaggttcgttatcttaagatcattgagaagagtggataccaggctctgccatgggtgaggtacataacaatggctggcgagtatgagctgaggctaatgtaactatgaaatctcaactggtgatccaattggtataaggtatgttcatctgtacttcgggacaaaaattggagagttggacgcggaagagcctcaggcaaatttggtttctttccatgggctgaggagtctattgtggcacatctccattctcaagctgatgagtctgcattcatcatctttaatttgttgcatacacttgagagtttgtgattgtgaagaaatgtctgtgccattagcatattttggtttaatcttttgatagttcatgtgcaaatttttccgccagtgatgtgaaaattgtgatctgttggtagtttaaactgtgaaatgaattttgcacgtcactttcaatttactattccaggactagactgtgatgtggtgtttgtaatctgttatgaaatttgtaattttacctgatttcatctctttta

SEQ ID NO: 8 - DNA, 2712 bp, Brassica napus
  source 1..2712: mol_type = genomic DNA
aatccagagtaaagctctaacggatgatctcagctcattcttctctttgacgttgctccttacataaaattcatcagatctcgtggattaacttcttctgtttgatcggatctgatatcgcaatccctagagaaaaccatggcaggggcggcctccgcgctgtttctgctcgatatcaagggccgcgtcctcgtgtggcgcgattaccgtggcgatgtcaccgccgctcaagccgagcgtttcttcaccaaactcatcgagaaagaggttcctctacgattactcttcccatctttgatctctagatgtgcgatttggtggatttgtattcacatctctgatttctagacgtttcttatgagattctcgtgaataaacatttggaacgaattagcaaagcttgatcagttgttatacgattgatattagattagaatttgatcagttgttatacgattgatattagattagagtttgatcagcattaatacattgcgattctccttggtggttttgttaatgttattggctaatctttcagggagattcacagtctaatgatccggtggcttacgataatggtgtgacctacatgtttgtacagcatagtaacatttacctcatgattgcctccaggcagaactgtaacgctgcgagtcttatctccttcttgcatcgcgttgtcgatgtaagcttccctaacaaaaagagcagaactttttgaaatgacaccgatcatttacctgtttcttatactgattgtaggtgttcaagcattactttgaggagttggaggaagaatcattgagggataactttgtggttgtggtatgttaatgcttctaccttctgctcttgatgaatattagatgctgaagttggtttgtgttggtggcagtatgagttacttgacgagatgatggacttcggttaccctcagtataccgaagcaaggatccttagcgagttcatcaagactgatgcttatagaatggaagttacacagagacctccaatggctgttactaacgctgtttcatggaggagcgaggggttacagtttaagaaaaacgaagtagatgcttttgtttagaagggaatggtttatttttatatcgtttaggtctccaaatgtttacaaacggctgttttgtttcccaggttttcttggacgtaatagagagtgtaaatatccttgtgaacagtaatgggcaaatcgtgaggtctgatgtcgttggagcattgaagatgcgaacctatttgaggtgtgttttctagtgttcttctaatgttagatcaaacttccctcctctttgactctctgcttcttaatccatggttattacagtggaatgccagagtgtaagctaggtctgaatgatagagtactgttggaagcacagggacgagcaacaaaaggaaaagcaattgatttggaggacatcaaatttcatcagtacgctttcctcttgctaactccaaacattctctgacagtcacttatccagaccactgttttacaatacttgagttctacatgtgtcttgacaaatgcaggtgtgttcgattggcccgttttgagaacgataggacgatatctttcataccacctgatggggcttttgatttaatgacgtatagactcagtacccaggtttgaaatgtggaatattgcatggatggctttttcttccttcttaaacaattaaaaatctcatgaaattttctttcttttttacattatacttgttcaggtcaagcctcttatatgggtcgaagctcagatagagaggcattccagaagtcgtgttgagatgctagttaaagctagaagccagttcaaggaaagaaggtaactactaatccttgtctgactttgcttgatatctactccatgtttttaccataaagtgataaaacgttaattttctacagcactgcaacgaatgttgagatcgagttgcctgtaccaactgatgcatccaaccccaccgtaagaacatctctagggtctgccgcatatgctcccgaaaaagatgctctggtttggaaaatcaaatctttccctgggaacaaggtaagtgcttataacttttaaatagtttttaaacgtaagaactgaccatataatgttgagtgtcttgactttaagttttgaaacaatgtaggagtatatgttgagagcagagttccatcttccaagtataaccgcagaggaagccacacctgagagaaaagctcctatccgtgtcaaattcgagatcccttacttcactgtttcaggaatacaggttagtctatcttgggaattttctatgtttctgtacttgttatctgaaaccttgaaattgaagaatcctaatgcgtgtgttaatgcaggttcggtatctgaagatcattgagaagagtgggtaccaagctcttccgtgggtgagatatataactatggctggtgagtacgaactcagactcatgtaacatgagatctgtgttgttttttgttttttatttacgccatttgtcaagaaaacaaaccagaggaagatcaaagaaaaggaaaaaagatttgaaaattttagctgatgaaaattacggtgaatgttggtttagagatctatatttcttgtgaattgttttcatggtgttctctctttatttttcctgtaagctcttttacgacaattattttggttaaaattgttaaacaagcaa

SEQ ID NO: 9 - DNA, 2456 bp, Brassica oleracea
  source 1..2456: mol_type = genomic DNA
atggcaggggcggcctccgcgctgtttctgctcgatatcaagggccgcgtcctcgtgtggcgcgattaccgtggcgacgtcaccgccgctcaagccgagcgtttcttcaccaaactcatcgagaaagaggtttctctactcttcccaatctttgattttctagatgtgcgatttggtggatttgtattcacatatttgatttctagatgttccttatgagattttctcgtgaataaacatttggaacgaattagattagagtttgatcagtgttaatacaattgcgattctccttgatggttttgttaatgttattggcgctaatctttcagggcgattcacagtctaatgatccggtggcttacgataatggtgtgacctacatgtttgtacagcatagtaacatttacctcatgatagcctccaggcagaactgtaacgctgcgagtcttatctccttcttgcatcgcgtcgtcgacgtaagcttcccttgatattcaatttttttttttgcaaaaagaacacttaactgtttcgaattgataactgatcatttgcgtgtttattaggtcttcaagcattactttgaggagttggaggaagaatcactgagggataactttgtggttgtggtatgtcactgcttctcccttctactctagtaatactctcttgatgaattcacatgaggcaaacaaatattagatgctgaagttgtggcttgtgttggtggcagtatgagttacttgacgagatgatggactttggttaccctcagtatactgaagcaaggatccttagtgagttcatcaagaccgatgcttatagaatggaggttacacagagacctcctatggctgtcactaacgctgtttcttggaggagtgagggcttacagtttaagaaaaacgaagtaggtgcttagtttacaagcagggaacattttgttttttgtattttgtttaggtttccaaatgttttacagactggtgttttttggtttctaggttttcttggacgtaatagagagtgtaaatatccttgtgaacagtaatgggcaaattgtgaggtctgatgtcgttggagcattgaagatgcgaacatatttgaggtgcgttttctactgtatcaactaaatcatgttagataaaaattcacttctcgttgactctctgcttcttaatccatggttattacagtggaatgccagagtgtaagctaggtctgaatgatagagtactactggaagcgcaggggcgagcaacaaaaggaaaagcaattgatttggaggacatcaagtttcatcagtacgctttccacttgctaactccaaacaatctctgacagtcacttatccggaccactgttttgagttctacgtgtctttcttcaaaatgcaggtgtgttcgattggcacgttttgagaacgataggacgatatctttcataccacctgatggggcttttgatttaatgacatatagactcagtacccaggtttgaaatgtggaatattgcatggatggctttttcttccttcttcaacaaattaaaaatctcatgaaattttccttcttttttacattatacttgttcaggtcaagcctcttatatgggtcgaagctcagatagagaggcattccagaagtcgtgttgagatgctagttaaagctagaagccagttcaaggaaagaaggtaactactaatccttgcttgatatctatgtttttaccataaagtgataaaacgttaattttctacagcactgcaacgaatgttgagatcgagttgcctgtaccaactgatgcatccaaccccaccgtaagaacatctctagggtctgccgcatatgctcccgaaaaagatgctctggtttggaaaatcaaatctttccctgggaacaaggtaagtgcttataacttttaaatagtttttaaacgtaagaactgaccatataatgttgagtgtcttgactttaagttttgaaacaatgtaggagtatatgttgagagcagagttccatcttccaagtgtaaccgcagaggaagcaacgcctgagagaaaagctcctatccgtgtcaaatttgagatcccttacttcactgtttcaggaatacaggttagtatatcttgggaattttctgtttctgtactcgttatctgaaaccttgaaattgaagaatcctaatgcgtgtgttaatgcaggttcgatacctgaagatcattgagaagagtgggtaccaagctcttccgtgggtgagatatataaccatggctggtgagtacgaactcagactcatgtaacatgagatctgtgttgttttttgttttttttttttttatttacgccatttgtcaagaaaagaaaccagaggaagatcaaagaaaaggaaaaaaaagatttgaaaaatttagctgatgaaaattacggtgaaatgttgttttgggatccata

SEQ ID NO: 10 - DNA, 9744 bp, Capsicum annuum
  source 1..9744: mol_type = genomic DNA
cgatctcaaaacccaaacacttttagcaaagacatatgaacatccagtaaaaaaatttccaaaaataaattgagtaaagagctaataataattaaccatttaaactctaccagcagtaggcagtagatctccatctccattccaacatggcaggggcggcctccgcgctgttcctccttgacatcaaaggcagagtactcgtctggcgtgattatcgtggtgacatcacttcaatacaagccgaacaattcttcactaagctcattgaaaaagaggtttcgtttgtttgaattaaatctccaaattgtgttgtatatgttttggtttaagataactcaagttagatgcattagcttcgattgaaattggagttaaatttaagtttacgagcattggaaaatggtgcaaattaatggtttttttttgagttaaacgtcgaaatattgttgtatatgatttggttgaaaataactgaagttgatgcgtttattattattattattattatttttatagtgaacagaaagttgttgatgcgtttataatggcatcgggttgaaatttgcgttcagaagcggatatttctgtaatttgatttgaagttacgcaactttatacattgtaatacaagcgaaaactaatgctctatgaccatttttgagaatatctacgctgtcgacaaaaaaaggttcttttgaattaaatattgaaattgcttcggattgaaattttagttaaatatgagtttaggagcagtaagaattggtgtagtttgatttgaaattatgcaagttagttacatgataatagaagggcgaattaagctctatgtctatttttgaaaatatttactccatggaaaaaaagaggttcttttttgatttaaatgtccaaattgttctatatgatttgattgaagattaaagtagttgatatgtttataaatagcttcatgttgaaatttgagataacgagagtggaaattggaataatttggtagtttgatatgaaattatgcaagttagttacataatactccctccgtcccattttatgtgtcgccatttgaccgcgcacggagttttagaaaaaagggaagacttggtaaagttaaccaaattatcctttatcaaaaaatgtgccaatatttttttttttaattaagtgggttcaataagggtaaaagggaaattgtgtctttaaaaagttgcctaataaggaaaggcgacacttattttgggacggactaaaaacgaaatgatgacacataatttgggacggagggaaaattatgctctatgtcaattttgggaaatataccccccccccttcttgattaaatgtcgaaatggttctatatttgaagaactcagaagttgatgtgtttataaatggcttcagtttgatattggcgttaaatttgagttcatgagagtggaaaatggtgtaatttgatggttttgtttgaaattgtgcaagttagtttcatgataatagaagggaagattatgctctatgtctattttttgaaaatatttacatcatgtagcccatactttgtgtataaacacacaatttattccatatttgtatataaacatcttttatacactattatacactttatccaaggttgatacagtatataatttgggctacatgacataaatattttcaaaaaaggtgcatatattttttaaatttgccatgatagaggggaggaagaataagaatttcttttgatgattacgtggttaacatttaaagcttcaaatcatgcaattttgtgcaaggcaggttcaaggagttatatttgatccctaattatgttgaacttgctcttcttaaagagcaagtctcattgagaagtcgaagttaagttgatgaatattaacacaaaaagtaccttttctcggatatggatgcctttttatcatctacatttttgtttcttttccagatgttttcatttattaggagcatgagcagtttattggttgctgtgtaatttgattgttatgtgatttgatctattgcagggtgatccacaggatcctgtagcatatgataatggagtgacctatatgtttatacagcataataatgtgtatctcatgactgcatcgaggcagaactgcaatgcagctagtctccttctgtttctacaccgtgtcgtagatgtaagttctgctgatatttgaggatgtgtcctctatatgtgttaatctgaaatcagttattccctcagtcacgggaaaaatgacggactttgtagtagggtttatccgttgaacttacagtttcaatttggatgtcggttcctctaatttttaaagtaaagattccatattataaccatataaagtgtatgtcacagtattttataattaaaatattctcaaaatggacgaaaatatcatggtaaaggaaatttctatttgactccttaaatagttattgtaccggaaaagtgtaaccgatggagtgatggatttctttgttggaacttgggaagatttataattttgttcttttacctttctggcaggtattcaaacattattttgaagagttagaagaggaatccctccgtgataattttgttgtagtggtacgtggaatatttcatgtctctttaagatcaaaagttggataggaaattatcattcatattggctcatccggactgagctgacttcttttctttttgcagtatgagctacttgatgaaatgatggacttcggttatcctcaatatactgaagcaaaaattctcagtgagtttataaaaactgatgcatataggatggaggttacacaaaggcctccaatggcagttacaaatgctgtgtcctggcgtagtgaagggatacgctacaagaagaatgaagtaggtgtacatgtttatttaagagtatattttcttcattgggttacatggaagcttgttctttcaggtgtttttggatgtcgttgagagtgtaaatatacttgtaaacagcaacgggcaaatagtgcggtcagatgttgttggtgcactgaagatgaggacatatttgaggtttgctctttgcattgtatattctttttccttttttacttaacctaccatacggctcatgcctcactaaggaaattacaacaacaacaacaacaacaacaacatacccagtgtattcccacatagtggggtctggggagggtagagtgtacgcagaccataccactaactcagttgaagtagagaggctgtttccaatagacccccggcttagaaccgataacagtataacaaacacaaaagataagtgcaaaataaactaacaccactagcaacaagataatactacaaccacaagataaaaataccactagcaacaagataatactacaaccacaagataaaaataccactagcaacaagataatactacaaccacaagataaaaataagaactatctaaccgaaatcatagacatcacacagcaccacgaataaaagactacagacacacaagaacgctccccttattgttattgatgcattcccaccccctaaccctctaccctagtccgcgtcctccacaccttcctatcaaggtcatgtcctccgtaagttgtaactgctccatatcatgcctaatcacctccctccaatatttcttcggtttacttctaccctgcctaaaaccatccatagctagtgtctcacacctctgcattgtagcatccgagcccctcctcatcacgtgcccgaaccaacgtaacctcacttctcgcatcttatcctccaccgaagcaactcccaccttctcccgaataatttcattcctcaccctatcttttttggtatgtccacatatccatcgcaacattcgcatctccgtcaccttcactaaggaaattaatatttaatccccccccgccaaattgattgataagaagagtaactcaaaacatagaaaaaaaaaaatcaaattttgatgcgtgtagtcatgataaataaagaaaaagctttaattagtttggttgatgattaaacaaatcataaaagaacaaacaaacaaatgagaaaagcttttgagttgagcagagtgggttatgactcattattcagcccaaattgaccggcctatttgacccaagcgaacatttggtgggttatgcccatcccatttattgactcaaattactttaaccaggtcaaatcttgcccatttaacgcccctgatgatgttcaagagctaggtaaaacttaatgctgaataaatattctgagatactcacaacaacagtcagtcggctgtacttactgcctgcctcctatctacctaaagatatctatgggacaccaggtgtggagcctataatgacatgtctgaatgagcatacagatccagcacttttaacctttttattggtgagtgacactatgtaagggtcacttttggcgctcctagttaaatctttcaagtacccaagtggccaagtcaagagtggaaacttagttcccttttccactttgtttatgttcctttttagaaactaatttaggaccttcaacctctagggcgttatctattgttttcaaagatgttccaactgtttatgattagtcaaatttgttaaatgtttgaatgcaaatcccttctccaaaccttttcatttaataactgtggtctacttgtgggggctacactttgagaagtacattccctaaactatacataatttcactccagaaggagatgactgtccaataagtttggaggcttcaaggtggacaagttttttgcgatctgaggttttggtgaaacttagaattggaaagtgccattcccaaatcaaacgatgcttcacaagcaaagtacattagaagatactcgagttggacctcagagttatcaagaaaagtttgtttttttacctggctaggaattagagggtgattttgacagctcagaatcttagggtgatgaaggtttcatatattagttggtgctttatgtgtaagggctcggatgaagatgtcaacaatcccttcatacattctcgggtagcttcgaggtcatggtgggagattctaggttggttcggacgccggaatcagttagttgatgctagaaactatgaaagaagtcatatccagttggagttgtggtagatggaagaaaagacgcaggttttggaacgtttcctcagtaccacttatgtggtttatatggagagagaaatatgagagcttttgaaggcgtagacatgaattttatacaaataagtaaggagtaaccttttatcactaatttccttttggtgtaccgatggggttcctttatgtatagaatagaagattgagtttcgttcgtaaaaatatatttttcttgtatgttttctacttagtggtgttcttcttgtgtacgggctattttttcccaaacatcaatactagtatttatattgtaatgataataataaatgtggtctagttgttggagtgtgagtttttctttaacttcttttatattttcagtttccggtgagcttttagctctttgttctgcatctgttgtagtgtcactatcttatcttctattgaatatgtgggattttttccgtgttgattcagaaaacacttagttccactacttgatagtcatgttcatgggtccctcaagtggagttgttggtattaccctactgtgtatggagtgactattatctgaatataagtttcattgtttgtttttgcagtggcatgcctgagtgtaagcttggtctgaatgatagaatgttgctggaagcacaagggagaactacgaaggggaaggccattgatctagatgatatcaagtttcatcagtatgaaattgttcagttatttcattttgtgggattatgatatactggtctctcttgtcaaacggaattttgtgggttggtcacttgtgtatttgcatatcacacttcaaagatgaaatgttttactaaatagcgtggcttggggtcctggaaaagtcaaacccattactttaaaaggaattaagtgaagtatgtggttgttgagcaagcaaacctgtacctctcgcacggtttgtcaaatgataaatcctgaaggcttttttatctatatactgaccagtttcaagtaacccatttctctatcttattgtcctcctctttctcttcaacaaattttgcttctaatttaggtgtgtgcgcttggcccgatttgaaaatgatcgcactatatcatttgtacctccagatggatcttttgatcttatgacctatagacttggtactcaggtaaattatgtgtttgctctgtctgtaaaacatagttcccttgtggacattcttgagcaaaatagtttaaacccttgatggtcatcgttctcaggtaaagcctctcatatgggtagaagctcaagtggaaagacattctaggagccgtatggaaattgtggttaaagcacggagccagttcaaggaacgaaggtatatgtctcaagtattatggtgaaaaattcaactaattagatgcatagtttaacttctactatggcttgtgttagaatatgagtaggaataggaatagcatataaaatcttacttggaaaaggattgtaatgtagtgtcctattaggaaaaggattggaatgtattgtctgtaaatagggcctcaatgtaataatgtagttacaacaattcaataatatttttatcttatatttctcacatggtatcagagcttctatgattttggtagagaatcaaagagattctgctgtcggcgggtggctataacccatatctgccgcccgtctgaccaatgatcatgttatcaaaagttagggcaccacacttctttttcgtactctctcatatctaatttgtgtagtaccgtgcatcttttcaaactactttctcatatttgagttgcatagcaccgtgcgccttttcagtgacttccatataatttctctttttcagtagggtcgtgctatcattccgaccctgcccatataatttcttttccagtaggatcgtgccgtcatttcgaccctacccatataatttctgtttcttaatagagtcgtgccgtcatttcgaccctacccatatttctctttctcagtagggtcgtgcatcatttcgaccctacccatatacttttttttcctcagattgtagtcacttttcagccatcaaatctaataatccggcgtgtgagcatgttttggctaagtttccggtgactttcatgttcaagatctactcgtctcttgatttcgagatgacccgtatattttataccagttttcgacaattttccagcgacacatcgaccttacgacaatatttactacttttcggatcatttttttcagtttgttccgtttcaattgaggtctcccatacgtccaaagcagtccttatcagttttcttgcagatagcttcaccaagtccctcaccgattctcatattagttacatccataacaagcttggtacatatgtcttctatgcaccagcttgagggggagtgttagaatatgagtaggaataggaataacatataaaatcctacttggaaaaggattgtaatgtagtgtcctattaggaaaaggattggaatgtattgtctataaatagggccccaatgtaataatgtagttacaacaattcaataatatttttatcttatattatttctcacagattgcatgcattacgttatgacaaagttttccatatccaatttacgagtttcttcgataatttcagtactgcaactaatgttgaaattgagttacccgtggcaacggatgctacaaatccaaatgtccgaacatcaatgggatcatctacttatgcacctgaaaaagatgcactgatttggaaaataaaatctttcccaggtggtaaggttagtgtagacttgatcattgttgaggatttaactcccctgatcgaaaaaagaagttgaggatttaactcatagtttttgtttgttctctcattgcacttgcctatatgtgttgccatttctttttcaggaatatatgttgagagcggagtttactcttcccagtattacagcagaagaatcagttcctgagagaaaagctcctatacgtgtaaaatttgaaataccttattttacagtttcgggtatacaggtaagccattaaaggcattagttgtactaactgtcaaaaagattggttttactttgtcgtagacttccaagtcttttttcccttgatttctgtaatctctacttctctaggcccatgttgatatccttgcttggtctatcatattaaaaaaccactatgagtttcggatgagctgttaacactatgtagttgattggttctcaggctgggaaggtagtaggggagtcggatggcattaggaattcgaactggcaattacactaaggctcaacacttcaaatggtattgggaattaagggttattgtacatgtaaaggcatattggggataatgaggtgatgttactggttcagttcagctgtagactcacattggaagaaacttagaactggcagaacagaacacaatgtccttttagttaaactccattttttaaagttattttccttgctagtcgctactgttattattgcttgacagtgtgcaatacgaactagtggaggcgatgtatagctgattgttatctcttcatgtgcaacaactgcgtatattgaagtctaattacccatggatgaacatgtctgttttcatggtacaaatatccactgtagtgctgcaattaaccagctgaataactttaaattatttaaaagtggagatgaggttatcggaaacagcctctctaccttgagctgggggtctatcggaaacagcctctctacctctttagaggtagtgatatggactgcgtacattctatcctctccagatcccactatgtgggaatatactgggtatgttgttgttgtaaaagtggagatgagtttataagactccaacaatactgactaatatgtggattctaattaggcactgagagttcaccacctgcctttctatagaacaggaagtaactatctctagtgggcaaacttttcttcagatctaatctggctatgctgtttgttgatcaaactgtcaaccacaatttgttcagtgttgggagagtcttttatatggaaactgaagtatatttttgttttttcctgttctgtaagctgatatagcgtgtgcttaacattgtaacaatatgtattgtttggtgcatgctaggttcgctacttgaagattattgagaaaagtggctatcaggctcttccatgggtgagatatattactatggctggtgaatatgagttaagactagtataaggtcaagcgcagatggtgtttccagccaattgagtttgttagcaggcctcaagtaacaagttctaaaactctgagcccgtttcgcaaaaggcaactgctcgttcactctggatagcaacatatttttgggggccagttttgttgtttattgtatttgactcttacatgtgatggtgttcatttgcttgtatcatagcttttaacgattagtctcatatcaaatatttcgtcaaggcagattcccaactatctactgctttgtatgtcttggtctcgtaacaaatgattgatgttaacaacattggcattttgttgttatatatttgatggtgggagtttcttttttata

SEQ ID NO: 11 - DNA, 8559 bp, Chenopodium quinoa
  source 1..8559: mol_type = genomic DNA
cctttgtctccctcatctaccaaaaaactcctcaaaatttcgacccctttcttttattttaattttttttaaaataattttttatcatccccacaaaaacaccagtgtatacagatcacaaaccttaatacacaattctgaaactcctctgaatcaaacactccagagcttcaaattgctcttcaatggcgtaaaataaatttcaccctaaattaaacagaaaaaaccgccattaccaattttcattttccaagcttcgattaaccaatttccaccagatctcctttccttcttcttcattgatctgaatctttccctaattttgaataatcagagtgataataattttctagggtttctgctgaatttcttcgatcgaagtaaacatgtcgggagcggcctcagcgctgttccttctagacattaaaggtagagttctcatatggcgggattatcgcggtgatgtttcagcggttcaagctgagaaattcttcactaagttcatcgagaaagaggtttgttctgatccatctaacctatttcttcatcttaatttgatttcaatcaagtttaattttgattattagtagtgttttttggctgatctgattaaattgagactgtttttacaatttttgaatgtttaatttggataattttccttatttttagttgttttactcgtatctatttgttattgggggctttgaattgagcttatttcgttagtaaagctcgattttcgctgttgttcatgaagtagatcccatttagaatgatgcaatttggattggcaactaatgtaggaagaagttttaggtttggcccattaggaaatgaagggtggttctgagatctttggtagctgactagcagtagcaacttttgcctgctcacattgtttgattggtagttcatattgttgttcagcttagaatgtgaattggggttgaagacttatactgatttgcaatcttattagctgattcttttgcttttatctgattgtaagaaagctttgtgtttgagtttgacttgggagtttttagggtgattatgtttagtgatcattgttacttggagatttggagttcgacaaaggattttttttttttttttttttttttttttttttttttttttgttggggggggggggggggagttagaaaaattcagattgactatttacaaagagtaatttgtgtttatggatttgtttgaagcttccaagagtgataacgtactaaacttgtgaattaggaaattaacactaacacaatgtttggattgagagaattggagggcaaggaagagaagagtaaagaagggatacatcctcccttatttggataccttttggtatgagggaaaggaagagaaatggaagacctctttaataaaccatatccttccaatgttgaaaagatttggagggaaaatgtaacattaccttctccctcccctcccattccttcttcttccctcccttctctttctcttccactttgctatccaaacaaaccataagtgatatagattaatgttagtggaccaaccgaaggatcatctcttgggggatttgtggttgttacaattaattgaaaggttttttttggggtgaattcccttgctagtacagggcaatttattttgccattggggtggactctttgtgcaatcttttacactttgtttggataggaagaaatggaaggaaaagaagagaagagaaatggagggggacaaaatttcttgtttgggtaaaagattgggggaaggaaggggaaggagagggagggatcaattttccctctctctttaataaccataatctctccaaaattggagagatttggagggaaaatggagctcacctccccctccctttcttttcccttcccttcctccattttccctccccttcttttccttccttctttgctatccaaacaaagcattagagtcggcaagatcttctttgtaagtggtaatacacaacacctgttcaaagaaggaatgtttgcataagtttctctgtccttttatggtatgcctggtaggtgaatcttacttttttattttgtcaattgctgcttgtttcagggtgatccacagtcgcaagatccagttgtgtacgataatggggttacatacatgtttatacaacacaacaatgtgtatttacttattgctactcggcaaaactgcaatgctgctagtgttcttctctttctccaccgtgtagttgatgtaagcaccattggtaatcattgttgttgtactaattttttctgttcccgtatgtttgtcatcctttggaaaagacctgcgttttctggtagaccgttcatctgagaacaactttcatatgcaggtgttcaagcattattttgaagagctagaagaagagtcacttagagataactttgttgtagtggtaagaggtattatctctctacttaagacaattctggtatggctgagattgatgcactgatactatgcctcatctgcagtatgagttacttgatgaaattatggatttcggctatcctcagttcacagaagcaaagatccttagtgagtttattaaaactgatgcttataggatggaagtcacacagagacctcctatggctgtgaccaatgcagtttcatggcgtagtgaaggaatatcttacaagaagaatgaggtcggtttgtgtttctaagttttgttttcacctttgttaacttgcactcactgatcagcttctctcttctattacaggtatttttggatgttgttgagagtgtcaatatacttgtaaacagcaacgggcagattataagatcagatgttgttggggcattgaagatgagaacatatttgaggtggatcaaatttcctccctactgttgctagaataagatcaaactttcagatgttgctttattatgtctttggacttttttttcctattgcttgaaattagctcatggtcttgtaatcatgtaatgaagtcatagctaaagctctgttttgcacaagaaaaatgaaggagaaaatgatgacatgttctgcttataaatgactcctttatctttctttgtgtgttgtatgtgcatgtttgtggtttcttttctcggggtggggttgggtgggggaatgggggattgcaatccctgtgttcaaatagtaacttagcattacatatttactcctaactacaagcgtgactatcactttattaattcattttttctgtgataaagcttctgtaaggttgcattttttcattggtaaaggtagtctctatactgcttgtttagtcatctatgaattgaaaggcatttgtaatttctctctaggtttttttaaaaaatgtagcaaacctaataagtaactaatctcctttgatgtaaaaatggaaaatgtataatattgttgaattaagtcaattttttttccttaccgtttgcatcctctgtggttatatacttatattttgatattctttgtggcagtgggatgcctgaatgtaaactaggcctgaatgatagagtattactggaggctcaaggacgaacaacaaaggggaaggctattgacctggacgacataaaatttcatcagtatgtttaactattttaagatttaagttgtagtagctacttttgctttgtttatgttgggagttgtaggtggaatatatggttggtaaattcttgtataatgattgatcgtcttttcccttttgctataggtgtgtacgtttagctcgttttgaaaatgataggaccatatcatttataccaccagatgggtcttttgatctcatgacatatagactcagtactcaggttcacttccatgatttctctgcattttctctcctctttgccacttgccccaaagacattatatttttttcttcctttataatggtttttgatattgttttgcttcaggtgaagcctctaatttgggttgaagcccagattgagaggcactccagaagccgtattgagatcacagtgaaagctagaagccagtttaaggagcgaaggtatagctattatgattggtcaaacatgtcttgtgctttcttctgtgctctatacttgtgtaactgtacatcttctaagtttcttgtttatgtgatctcaatattatagcactgcaacaaatgttgagattgaactaccagttccatctgatgccaccaatccaaatatccgcacatcgatgggatctgctgcttatgcacctgagaaggatgctttagtctggaaaataaaatctttccctggtggcaaggtaaattgttgttggaatcaaaacctgccttttatggatcattatgacatacctctataggctctaatataataggttttgaaatttgttttttttaatactctgtaatgaacaaatttcaggaatacatgttgagggcggagtttagtcttcctagcatcactagtgaagagacactacctgaaagaaaagctcctatacgggtgaaatttgagatcccgtattttacagtttcaggaatccaggtatgaaaacttggagattttgaaaaaagcatgcaaaatttatctgttcttggcttcttgcatcatgttctggttctgcttggtatctcttttgcttgacatgtgactacttatatctttaggagaaaacagacattgataaacataaaaataggttacatagttttggtaggaccttcttccgcctcatttaacatgacatattttttgcctggattgtggtgttacctatatacttagttgaagaaggagattttagagaacatagtaatgaaatatgtttccttctccacaacctgatcagggatgataatctgtgtccaatgatcatatatgtccaatttatcgaattttaatgatttcagtgatcataattcttttctgctttccctttgaatatctctaccttgtgtactgctgtgctgtgtctaatattttccatcccttctcacacctttagtataaagctagtattttctgattaatggaatctgaaaagtaaaacctttttctctttcagctacttcttggacatgaataatatactgttagattttcattctgatctctgtcttgaaccagagataaatgtgcaaattggcatcttctattttctgtagttagacctattctgttttttttttctcccctcaccctctatacaactataaactttgcatctgatatggtcactttcatggttagaatgtcagaaattttttgggttctgaaacttggcttgagttgaaatcaaattaaacccgttgccagttaattacatttaagtcattgcattagctccacttcttttctgcggtatagttgatggtcatgtaatattgtactatgaacttgggaacagtagttgaagcattagtgattttttgtagaaagaagccaacgaaaagtgattagacttagcacttaggatttgggttaggatattggattttgttgagttgtgaaagaaaaagtctgagagaggaggataccagaagaacgagggaggaattgaggaaaaagtaggagtgtgtgtctcttaatctcttaaacctcgtaattatcaaccccagtgtaccctctctcttattcggttcttcctatcagcttccaattaccatatatgatgcaacgatgctgcctccctttgtcatctaagtttctttttagctttatcatgtattgggctgcatatatttagataggccagcaagtgagcaaccattctgtgcctattatccatacattttttgcttatctaatatccctaatgctccagtgctgggattaaattatagcaattctttggacttacactttaggaggccatcccataactgagggataacagagttcatattatgtgtgaccttttggatacagttaaaggacgtggaggattcaagagtatcaccgggagattcttatgggcttattttatttcattatcatttcttatttctttgtatcatcccccctagatattctgcttttccctttaaggtgaggttttgtgtggattttagctttggtactgctcaatacttggtatgctccaaaagcggtggccatggatggatttattacctgacatttgcttgctttgttgggctaatagtgaatcttcactagatgcatactgtttgctacctttggaaaagacactttgcaggccgtgaagagtattggggaagaccttcaagtttactgtagtggggtttgctacagggaaggagaagaaattgctttggtgaaaaggcaataatggctattttttggtttgtctggagtggaatggccttttatttttgtgaatggtcttggtgtctcagtgtcttgtgtgattaattgtgggatatagtaactttatagctgtcccaaattactcgattgggaacgtacaaatcaatgggctattgagcaacaactaaggtgtctagagcaatagacatggagaaagagtaatgatacagtttggagaatctgtcatgattaacgtagtttatgttttgatcccacattctagttttgaacctttcccattttcctcggagagttttcctcttcagtttgaagtctaatggtcatacaaaggcctcaggtatttgtaggtcacccctttgaaggaaatagcttgcaattgttgtatttgtgcagaagatgaaaaatcagtagtttgttattgtcgtgtcaaatgatctggtaaggctgaagatgttctggtggcatgggaaagcaagatcaatagaaagtgaattcatagatgtttaactagattcctatggaacttggtggtacatgtaaagaataagcaagtattttatttagggcaaagctctctcacatcctacttattatggagtatgttgttttaagggttttaagtgttaaactgttattttataggttcggacaagtttacgaggcaggtcaatcttggttaaaggttgcaaaatattcatggtttttgttgacccaacaggttgaggtcacataagtttttagttgtatgaccacttatcctaaacttttgtaaagtttttggattaacccaacaggttgagttcacatgtacttgtgggttctagatataagtgaaattctgttcaaaacccaaaactgcaggttggttttagggttgagactctggtcatgtctttaattttaacctgcctgttgaagccaactgcctttttatgagcaccattatgaaagtgtaattgttgggctaggagaccttgtttttagaactgaagggatatgtgattagtatcttgatgtcggtaactgttgctgactttctgaggcagatgtgttgcccaaggggacagtgggtatataaagtagtgcacatcccattaatgtccagcctgaatttgggcacagccaactgtaagatgcaaacctgatatttcaatgtggctgaccttgtatactgtgtagtagatctttgtgatagcttcacttctgttgttgccctttccagaaagttccactatatcattatctgtagtcccgttgaatgtccatcccaggtgctcaagtgaaaatatttcctgtattttggtgggtcctggaaaaaaaagtaggacaatgtagttcaaaaacttaagaagtcaaattccaaagtgttctaaatcttggttagtggacaaatgtaaaagtgctgcattattgcctattgccatggtctacatatcccttgcatatgtagccaactttgatcttgaaaattttaggtgataaacacaaagtgttagattaaatccatcactttactacctatgttattttcttgtctggtcaattactgcagtcagtcatattgtcatgccttatattttccctgttcagtgtgcactttcgttctttgtttgctctgttgattgtcttttgagctcaaaacaactgttatgtatatctgcaatacttgttctgcaggttcgttatcttaagatcattgagaagagtggataccaggctctgccatgggtgaggtacataacaatggctggtgagtacgagctgaggctaatgtaattcaactggtgatccaagtgctatttggtatgtttatttgtatttcggggcaaaaactggagagttggactaaaatgagcatgaagcaactttgatttcttttcatgggtcaagcagttcagcagtcccttgtgacgtatctccattctcgagctgatgagtctgtcattcattatctttgttgcatacacttgagagtctatgattgtgaagttaagtctcagccgcatagcgttttgttttaatcttttgctagttcatgtgcagaattttacttcactgatgtgaagattgtgttctgctggtaatttgatctgtgaaaatgaatttttgccagtcacttttaattctttgtttcaggattggtgatgtggttcatgtaagagagtatgaatacctgttatgaaatttgtaattctatctaattacctcattcttttgactaatatttcagaagattgatattttgaaa

SEQ ID NO: 12 - DNA, 8559 bp, Chenopodium quinoa; identical to SEQ ID NO: 11
  source 1..8559: mol_type = genomic DNA

SEQ ID NO: 13 - DNA, 3660 bp, Citrullus lanatus
  source 1..3660: mol_type = genomic DNA
atggcgggggcggcctccgcgctgttcctattagacatcaaagggcgtgttctcatttggcgcgactatcgtggcgatgtctcggcagttcaggccgagcgcttcttcaccaagctcatcgagaaggaggttctggatctttgttttatttaatcagtccctgatagaatcgtactcttatttgctttctaggacgagtgatttagtttttgttcactactaaattcatgatatatgcgactgaatcagagaaattggaggtcttcgtttcggatttgtttatcttatgtcattaggaagcagattcaaataaagaactggctgaataaaatgatttgaatccctacctgacagattgctcaaaatcttttgatgtcagggtgatccgcaatcgcaagatccagttgtctacgataatggcataagctacatgttcattcagcacaataatgtgtacctgatggttgctgcgaggcagaattgcaatgctgcaagtcttctttcctttttgcatcgagtagttgatgtaagttgtatatatgatcatagcgttctccaacaaagcattttggtatttcaaacacgtttaatttggattaatgatagtgtacacattatcttagttcctgaagttacatgattcagtaagattgcggataagatttcttaaaatttgaggctacttaggatcttcattttctatcaaaaataggagaataatcttttttccattagtttactcttctgcattggtttcggtggtaaatggtaatgaaattgctattttgttttccttataaaatatattgatttataggtagattttgggacttccgagcaactatgtttcgtgttgagaaagaaaagtaataaatgattgacgtgaattgttatgctacaggtctttaagcattattttgaagagttggaagaagaatcgcttagggacaactttgttgtggtggtaagatatggctttcacagatcgaatccctatgaatttcttaaattgttcaccatatcatgtattgtgatttatgtcaggtggtgaatgataatattaatacttatattctttgtagtacgagttgcttgatgaaatcatggactttggttatcctcaatacaccgaggccaaaattcttagtgagtttataaagactgatgcttatagaatggaggttgctcagaggccacccatggcagtaacaaatgcagtttcttggcggagtgaagggataaattacaagaagaatgaggtatgtgttcttcgaaagaatgagctgtatttgttcactttttatttttaaagcatagtaggtaatgtcttgttcttatttctccaggtctttttggatgtggtggagagtgttaatatacttgtcaacagtaacgggcaaataattaggtcagatgttgtgggcgcattgaagatgagaacttacttaaggtttgctcacaatgctctgagaaatctacatcttgacacggaaaaagtttgtactttctatctacacttgcatattacacgataatatcctcaaaagtacttttcctggtaatcaagaaaagttttctagtcatgcatacatcctgttattggtttgctctctcttttactttcacataagaaaagattttaaattgttttagcgaactctggactgggaaactaaaccattcagaaagtgtggtctatttagtgattctagcaagcttaagaagtgttaacttttgaaacatgtgaatattgtctaagtggtattgttcaaatcttcatttctttgctttctgtttttatatttcagtgctttattattatatgaatatgtacttattcataacttggccatgtggtattgttgaaaccttatttctttggtttcctgtcccttctttcagtgatttgttatgatatccttcttctcattccatttgtatctttgctaggtgataagcagaaattaaggtttggtttgtttgttgttgtagtggtatgcctgagtgtaagcttgggctcaatgacagagtattattggaagcacaaggccgaactacaaaaggaaaagctattgatttggaagatatcaaatttcaccagtatgtatcaaaccatatggtgcatttattttcttgtactagtgatatatgtgcattgtgttgggcacagacttcataagtgttatgccagtttctatgttatctaagtacaaatgcttttttgcgggggggctctaggtgcgtacgcttggcccgctttgaaaatgatcggaccatatccttcatacctccagatggatcttttgatctcatgacttatagactgagcactcaggttggatatatccacgtagatgctattttataagtcaccgttggtttattcattacttccttctatctcattatttgatttgctttgtccttgttgactttattcattacttccttctatctcgttatttgatgtgctttgtccttgttgttgacaggtaaagcctcttatttgggtggaagctcaagttgaaagacattcaaaaagtcgtattgagattatggtgaaagcaaggagccagttcaaggagcgaaggtattataaaatatctttttttttttttttttttccaagggtgattcagtaaaaatcttatcttcctaggttctttttactaataaaaagttcatcatacagcaccgcaacaaatgttgagatcgagttgcctgtcccagcagatgctaccaacccaaatgttcggacctcaatggggtctgcttcttatgcaccagaaaatgatgcattatgctggaaaataagatcgtttccaggtggcaaggtattttatatttcatttgcttctctgtcaatgctcccttaccttatgcacgaatggcagatgattcgggaagctaattttcttgatcttaatttggaaaatttaggaatatatgttaagggcagagtttcgcctgccttcaattacatctgaagaagcaactccagagagaaaagcgccaattcgtgtaaagtttgagataccatacttcactgtttctggaatccaggtacacttccatatgctttctctggttattcctgtttaccattcagtgacatgataactcctctttacccttcagtgacatgataactctatgcaaaaaaaatttctaaagcacaaactaattcatctaaaatctaccctattatttcaatgagatcacggacaacaaatcttaccgtgtccaaactctctcttatgaaaagttggcatatttttcatttagtaaaccgacctcatcttggatttattctgtatttgtgatatcagatatgtgaacacagttagatctggtagatctacattactttcaggctcaaatatgtgagcaaaaatctgttattcttgtttgttcatcgtattgacagggtgaaccatataaccattttggagatgaataagtataaacttcggaagatatgatgtttctctttattagtatgaaactaggagtgcagatatgataatttagatgttaatgtgcaatactatgatttcgtaggttcgttacctgaagataattgagaaaagtgggtaccaggctcttccatgggtgagatacatcacaatggctggagagtatgaactaaggctcatatga

SEQ ID NO: 14 - DNA, 4849 bp, Cucumis melo
  source 1..4849: mol_type = genomic DNA
taattccaaactagaataactcagccattggaaggaacagctaattgccgcagatcgtcttgtagtaaaaatggttgagcgtcgggatccagaggacacaagtttctggctcgacgatgtgttgaattgattcaactagatctaccgttttagccagttgattcttctgctgaacatcgcgagatctccttcaatttcttatgctctccttgatttccttcaacaacctagctaccaggaggaagaattttttctactagtgatttacagaccgctttctgatttgattcaatggcgggggccgcctccgcgctgttcctattagacatcaaagggcgtgttctcatttggcgcgactatcgtggcgatgtttcggcagttcaggccgaacgcttcttcaccaagctcatcgagaaggaggttctggatctttgttttattttatcacttcctcatacaatcgtactcttgttcgcttttgaggacaagtgatttagttatattgatgataaatgcgactgaattagagaaattggtggttttcatttcggatttgtttttcttatgtcgtttggaagcagatttaaataaggaactggctaaataaaatgatatgaatctctacctgatggattttgtcaaaatcttttgatgttagggtgatccgcaatctcaagatccagtagtttacgataatggtataagctacatgttcattcagcacaataatgtgtacctgatggttgctgcgagacagaattgcaatgctgcaagtcttctttcttttttgcatcgagtagttgatgtaagtcgtatatatgatcatatcgttctccaacaaagcattttggtacttcgaacatgtttaatttggatatataacaatgttcacataatcttagttcctgaagttacatggtttagaagatttcttaaactttcaggctacttaggatctttttctgtcaataataggagaacaattttccccctttagtttgtttcagcattgatttcgttggtaaatgtgaaggaattttctagtttgttttcttcataaaatatatcggttttagttagtttttaggacttccaagaaaatatgtttcatgatgagaaagaaaagtaataaacagttgacgtgaatcattatgctacaggtcttcaagcattattttgaagagttggaagaagaatcacttagggacaactttgttgtggtggtaagatatgcctctcacagatcaaatctttataaatttcttatattgttcaccatatcatgtattgtgacttatgtcaggtggtgaatgataatattaatacttattttctttgtagtatgagttgcttgatgaaatcatggactttggttatcctcaatacaccgaggccaaaattcttagtgagtttataaagactgatgcttatagaatggaagttgctcagagaccaccgatggcagtaacaaatgcagtttcttggcggagtgaagggataaattacaagaagaatgaggtatgtgttctttgaaagaatcagctgagttttttgtgatgtttaaagcttagtaggtaatgccctgtttttatttgtaggtatttttggatgtggtggagagtgttaatatacttgtcaacagtaatgggcaaataattaggtcagatgttgtgggcgcattgaagatgagaacttacttaaggtctgcttacagtgcttttaaacttacatcttgacacagaataagcttgtactttcttctcttgcatattgcacacaagatcctcaaaagtactttttctggtaatgaaaaagagtcttctagacatgcatacaacctgtattagtctgctctcttttactttcaaaaaagaaaatgtttctattgttttagtaaactctgaaattggaaactaaaccagtcagaatgtacaatctgtttaatgattctaaaaagcttagaagaagagttgatttttgaaacatgtaaatattgtcttagtggtattttttaagccttcatttcttgatgctatagttgatacagttgtgtcttggtgtaaatgtttcccttatttcgccgctatagttttaccatgctcctttccaattgaaacttctgttgtaactcctatttcgggtctccctcttcttttgtaatttcataacatcaatgaaattgttttttccctttaaaaaaaaggtattgttgaaaccatcatttattttccttccggtctcttctttcagtaatttcttataatatccttctcattccatttgaatctttgccggttgataagcagaaattatggtttggttttgtttattgttgtagtggtatgcctgagtgtaagcttgggcttaacgatagagtattattggaagcacaaggccgaaccacaaaaggaaaagctattgatttagaagacatcaaatttcaccagtatgtatcatatggtgcatttactttcctgtgctagtgatatctgtgtattgtgttggcgacattaactaaaaatgataatataagtgttttgccagtttctatgtcatctctaagtacacaaatgctttttttgggcgggctttaggtgtgtacgtttggcccgctttgaaaatgatcggaccatatccttcatacctccagatggagcttttgatctcatgacttatagactgagcacccaggtttgatacaaccacgtagatgctattttctaagtccaccattggtttattcattactttcttccatctcgttatttgatgtgtttcattctttttgttgacaggtaaaacctcttatttgggtagaagctcaagttgagagacattcaaaaagtcgtattgagattatggtgaaagcaaggagccagttcaaggagcgaaggtattttcaaatatcttctaatttattctttgaggcggttcagtaaaaatcttatctacctagtttatttttaccaataaaaaactcatcatacagcactgcaacaaatgttgagatcgagttgcctgtgccagcagatgccaccaacccgaatgttcggacctcaatggggtctgcttcttatgcaccagaacatgatgcattgtgctggaaaataagatcgtttccaggtggcaaggtatttaaaattttatttgcttctctgtcaattataccttaacttatgcatgaaagctaaatttcttgatcttaatctggaaaattcaggagtatatgttaagggcagagtttcgccttccttcaattacatctgaagaggcaactccagagagaaaagcgccaattcgtgtaaagttcgagataccatacttcactgtttctggaatccaggtagcacttccatatgatttctgtgtttgttcctgataactcctctttctttcctctggttttccatgcaagaaaatttctattattgcttgagaggatggacaacgattcttaccccgtataaactttcttaggaaaagttgggaaaattttcttctagtaaaataaaagtacacaacgggatcaggcactagacattatggggctccacttataaaaacagaaaacctaattgtggacgattacaaaaatacctgtaatatgtagggaatttctattttagacaatatgtagggaattttaatgatgcgatgccagcatcatcaattctgaatttttttcacctttggaagtgcctttggtcattaaaaagtatacaacgggttcgagccctagaaattaggacctccaagcataaaacaaaaaatttattgtggatgactacaagaatacctatgatatgtagggaattttgatgcaccgaaaaactcagatttgttcacaactaatgcccgaaggcatttctaaagtatacaacgggttcaggccctagaaattaggggccccacgcataaaacaaaaaatctgagtgtagatgattacaagaatacctatgatatgtagggaattctgatgcaccgaaaaactcggatttgttcacaactaatgcccgaaggcatttctaaaggtgaacaaatctgaaatggaaggtatccaaattcatttttataatcgtccactgttggattttatgtttctatgagtgggtcccctgatctctcatcttggatatattctgttgtttatgttgtcagatatgtcaacgtagttatatctagtagacttaaattagtttcaaggctctaatatgtgatcgaagatcaattctttttgttttttacatcatattggtggagaataaagataacatggtgaattatacaaccattttggagtagcataagtataaacgtcggaagatctgatatttctctttattagtatgaaactaggagtacacagatatgatattttagatgttaacgtgcagtactatgatttcgtaggttcgttacctgaagattattgagaaaagtgggtaccaggctcttccatgggtgagatacatcacaatggccggagagtatgaactaaggctcatatgaaaaatcacttactttgatttatagacattttcgttttgcagagttcatatgtcgtgaattattcagttaataatcacaggatgagttaaagatttgttgttgtagaggatttggtggggaaaaagagagaaaaaaaaaatactgtttttctactcttcttttgtttgtgaagcatattgcagcttttgtaagttcatagtaactgagaagggtttcttttcctttatttttcttttttactacactaggtggtctggttgaattctgttttgattatattactttcaactagctccatttctatccgtttaatttgttataaccattgtcattttccaaa

SEQ ID NO: 15 - DNA, 4548 bp, Cucumis sativus
  source 1..4548: mol_type = genomic DNA
aggaaagggaagaaaaaaagaaagtcttaattccaaactagaataactcggccattggaaggaacagctaattgccgcagatcgtcttgtagtaaaaatgggtgagcgtcgggatccagaggacacaagtttctggctcgacgatgtgttgaattgattcaactagatctaccgttttacccagttgattcttctgctgaacatcgcgagatctccttcaatttcttatgttctccttgatttccttcaacaacctagctaccaagaggaagaattgtttctactagtgattcacagaccgctttctgatttgattcaatggcgggggcggcctccgcgctgttcctattagacatcaaagggcgtgttctcatttggcgcgactatcgtggcgatgtttcggcagttcaggccgaacgcttcttcaccaagctcatcgagaaggaggttctggatctttgtttttattttatcacttcctcatacaatcgtactctttttcacttttgaggaggagcgattagttatattgataataaatgggactgaatcagagaaattggtggttctcatttcggatttgtttttttttttttttatgtcattaggaactggctaaataaaatgatatgaatctctacctgatggattttgtcaaaatcttttgatgttagggtgatccgcaatctcaagatccagtagtttacgatagtggtataagctacatgttcattcagcacaataatgtgtacctgatggttgctgcgagacagaattgcaatgctgcaagtcttctttcttttttgcatcgagtagttgatgtaagttgtatatatgatcatatcattctccaacaaagcattttggtatttcaaacatgtttaatttggatatataacaatgttcacataatcttagttcctgaagttacatggtttagtaagatttcttgaactttgaggctacttaggatctttttctatcaataataggagaataattttcccccattagtttacttttcagcattgatttcgttggtatatgtgaaggaattttctattttgttttcttcatatatcgattttaggtagattttgggacttccaagcaaataggtttcatgatgagaaataaaggtaataaacggttgatctgaatcattatgctacaggtcttcaagcattattttgaagagttggaagaagaatcacttagggacaactttgttgtggtggtaagatatgcctttcacaaatcaaatctttgtaaatttcttaaattgttcacatgtattgtgacttatgtcaggtggtgaatgatagtattaatacttatattccttgtagtatgagttgcttgatgaaatcatggactttggttaccctcaatacacagaggccaaaattcttagtgagtttataaagactgatgcttatagaatggaagttgctcagagaccacctatggcagtaacaaatgcagtttcttggcggagtgaagggataaattacaagaagaatgaggtatgtgttctttgaaagaatcagctgggattttttgcgatgtttaaagcttagtaggtaatgccctgtttgtatttctccaggtctttttggatgtggtggagagtgttaatatacttgtcaacagtaatgggcaaataattaggtcagatgttgtgggcgcattgaagatgagaacttacttaaggtctgcttacagtgctttgaaatttacatcttgacacagaataagcttgtacttttttctcttgcatattgcacacaatatcctcaaaagtactttttctggtaatcaaaaagagttttctagacatacatacaacctgttattagtctgctctcttttactttcaaaaaaagaaaatatttctattgttttagtaaactctgaactcggaaactaaaccattcagaatgtatgatctgtttaatgaatctaaaaagcttagaagaagtgttgattttttaaacatgtaaatattgtcttagtggtattttttaaaccttcatttcttgatgctatggttttaccatgctcctttccaattgaaacttctgttgtaactcctttttcgggtttccctcttcttttgtaatttcataacatcaatgaaatttttttgtctccttttaaaaaaagtattgttgaaaccatcatttcttcgctttccggtctcttctttcagtaatttgttgtagtatccttctcatccatttgtatctttgtcggcagaaattatggtttggttttgtttattgttgtagtggtatgcctgagtgtaagcttgggcttaacgatagagtattattggaagcacaaggccgaaccacaaaaggaaaagctattgatttggaagacataaaatttcaccagtatgtatcaattcatatggtgcatttactttcctgtactagtgatatctgtgtattgtgttggctacgttagctaaaatgataatgtaagtgttatgccagtttctatgtcatctctaagtacacaaatgctttttttgggcgggctttaggtgtgtacgcttggcccgctttgaaaatgatcggaccatatccttcatacctcccgatggagcttttgatctcatgacttatagactgagcacccaggtttgatacaaccacgtagatgctattttctaagtccaccgttggtttattcattattttcttctatctcgttatttgatgtgtttcattcttttgttgacaggtaaaacctcttatttgggtagaagctcaagttgagagacattcaaaaagtcgtattgagattatggtgaaagcaaggagccagttcaaggagcgaaggtattttaaaatatctcctaatttattttttgagggggttcagtaaaaatcttatctacctagtttctttttactaataaaaaattcatcatacagcactgcaacaaatgttgagatcgagttgcctgtgccagcagatgccaccaacccgaatgttcggacctcaatggggtctgcttcttatgcaccagaaaatgatgcattgtgctggaaaataagatcgtttccaggtggcaaggtatttaaaattttatttgcttctctgtcaattatacctaacttatgcatgaaagctaattttcttgatcttaatctggaaaactcaggagtatatgttaagggcagagtttcgccttccttcaataacatctgaagaggcaactccagagagaaaagctccaattcgtgtaaagttcgagataccatacttcactgtttctggaatccaggtagcacttccatttgctttcgtgtttattcctgataactcctctttctgccctctggttttccatgcaagaaaatttctcaaaacacatacttcgtctaaaatctaatataaacagtcttttatgaaaagttgggaaaattttcttttagtaaactaagtacacaacggttcaggcactagaaattatggggctccacttataaaaacagaaatcctaattgtggacgattacaaaaatgcctataatatgtagggaatttctattttagagaatatgtagggaattttaatgatgcgatgccagcatcatcaattctgaattttttcattagaaagtatacaacgggataaggcgccagaagttaggagccccacgcataaaacaaaaaatcgagtgtggatggttacaagaatacctatgatatgtagggaattttgatgcactgaaaaactcggatttgttcacaactaatgcctgaagtcatttctaaaggtgaacaaatccgaaatggaagaatatccaaattcatttttataatcgtccacagtgggtccccgatctctcatcctcgatatattctgttgtttatgttatcagatatgtcaacgtagttagatctggtagacttaaattagtttcaaggctcaaatatgtgacggagaataaagataacagagtgaattataaccattttggagttacataagtataaacttcagaacgtctgatatttctcttaattagtatgaaactaggagtacacagatatgatattttagatgttaatgggcagtactatgatttcgtaggttcgttacctgaagattattgagaaaagtgggtaccaggctcttccatgggtgagatacatcacgatggctggagagtatgaactaaggctcatatgaaaaattacttactttgatttatagacatattcgttttgcagagttcatatgtcgtgaattattcagttaataatcacaggatgagttaaagatttgttgttgtagaggatttggtggggaaaagaaaaaaaaaaaaaatctgtttttctactcttcttttgtttgtgaagcatattgcagcttttgtaagttcgtagtaactgagaagggtttctttttcctttatttttcttttttactacactaggtggtctggttgaattctgttttgatcatattactttcaactagctccatttctttctctttaatttcttataaccattgtcattttccaaa

SEQ ID NO: 16 - DNA, 4117 bp, Cucurbita maxima
  source 1..4117: mol_type = genomic DNA
acgccgaacatgaatttatttatcagaaaaaagaaaactcccaattgcaaactaaaataactcggcaattggaacatcttgccgcagatcgtcctctagtaatggttgagcgtcggaatccagatgacacaagtttctggcgcgacgatgtgccgaattgattcaagtagatctaccgttctagccagttgattcttctgctggacatcgcgagatctccttcaagttcttatgctctccttgttttcgcgaacaacctagctagccggaggaagaattgtttctagtgatttacaaaccgttttctgatttgaatcaatggcgggggcggcctccgcgctgttcctattagacatcaaagggcgtgttctcatttggcgcgattatcgtggcgatgtctcggcagttcaggccgagcgcttcttcaccaagctcatcgagaaggaggttctggatcttcgtttaatttgatcggtccctggtagaactatagtcttattttctttttagggcgagcgatttagtttctgtttactagtaaattggtgataaatgcgattgaatcagagaaattggaggtcctcgtatcggatttgtttctaattatatctttaggaagcagattcaaacaatgaaatgtcaaataaaatgattcgaatctctatctaacaaaattttcaaaatcttttgatgtcagggtgatccgcagtctcaagatccagtagtttacgacaatggaataagctacatgtttattcagcacaataatgtgtacctgatggttgctgcgaggcagaattgcaatgctgctagtcttctttcctttttgcaccgagtagttgatgtaagttgtatatatgatcagagcgttctccaacaatgtattttggtctttcaaacatctctaatttggataaatgatagtgtacccattattttagttcctaaagttacaaggttcaataagactttggataggatttctaaaaattcaaggctacttaggatcttcattttctatcaacaagaggagaataattttttgtccgattagcttacctttctgcgttgtgtctgcagtaaatggtaatgaaattccatttgtgttttccttgcaaaatatataggatgtaggtaggttttgggacttctgatcaaatatgtttcatgagaaagaaaagaaataaattattgacatgaatcggtataccacaggtcttcaagcattattttgaagaactggaagaagaatcgcttagggacaactttgttgtggtggtaagatatgccttttatcgatcgaatccttataaatttcttaaacttttaccatagcatgtattgtgatttatgtcaggtggtgaatgatgatattaatgcttatattctttgtagtatgagttgcttgatgaaatcatggattttggttatcctcaatacaccgaggcaaaaattcttagtgagtttataaagactgatgcttatagaatggaggttgctcagaggccacccatggcagtaacaaatgcagtttcttggcggagtgaaggtataaattacaagaagaatgaggtatgtgttctttgaaagaataagctgcatatgttcatttgtgattcttaaagcttagtaggtaatgcactgttcttatttctccaggtctttttggatgtggtggagagtgttaatatacttgtcaacagtaacgggcaaataattaggtcagatgttgtgggggcattgaagatgagaacttacttaaggtctgctctcatagtggtttgagaaatttacatcgtgacacggaaaaagcttgtactcgttcacttccatattgcacacaatatcctcaaaagtactttgtaatcaagaaaaagtttttagtcttgcatacatcttgttattggtttactctcacttttactttcaatcaagaaatgattttaaactgttctagcaaactctgaactgggaaactaaactgttcagaaagtatgatctatttaatcattctagcgagcttagaagaagtgttaactttgaaacatgtgaatattgtctatgtggtattgtcgagatcttcatttctttgctttctgttatttcaatgctttattattatgtacataagcacttattcgtaacttggccttctggtattgttgaaaccttcatttctttactttccagtctccccattcagtgatttgttataatatccttctcattccatttgtatctttgctagttgatttgcagaaattaaggtttggttttgtttcttgttgtagtggtatgcccgagtgtaagcttgggctcaatgatagagtattattggaagcacaaggccgaaccacaaaagggaaagctattgatttggaagacatcaaatttcaccagtatgtatcaccatatggtgtattcattttcttgtaatggcaatatctgtgcattttgttgggttcggatgctatatatagtaatgtatgacttcataagcgttaggtcagtttatatgttatctaagcatcaaaccaaatgctttttttaggtgcgtacgtctggcccgctttgaaaatgatcggaccatatccttcataccaccagatggagcttttgatctcatgacttatagactgagcactcaggtttgatatgttcacgtggatgctattttctaagtcacgttggtttattcattgcttccttttatcttgtaatttgatgtgcttcatcgtttttatcgacaggtaaagcctcttatttgggtagaagctcaaattgaaagacattcaaaaagtcgtattgagatcatggtaaaagcaagaagccagttcaaggagagaaggtattagcctttaaaaaatttaaaaaaaaaaaagaaaaaaaaaagaaagatgcaaaagtaaggtttgaggggggtcagtaaaaatataatcttcctagtttctttttactaataaaaagttaatcatacagcaccgcaacaaatgttgagattgaattgcctgtgccagcagatgctaccaacccaaatgttcggacctcaatggggtctgcttcttatgcacctgaaaatgatgcattatgctggaaaataagatcttttcccggtggcaaggtatttaaaatttcatttgcatgtctgtgaacgcttagcttaccttatgcatgaataccggatgattcaggaagctaattttcttgatcttaatctggaaaattcaggagtatatgttaagagcagagtttcgccttccttcaattacatctgaagaagcaactccagagagaaaggcgccaattcgtgtaaagtttgagataccatacttcactgtttctggaatccaggtagggcttctttatgctttctctggttagtcatgtttaccattcagtgacattataactcctctttcttccctctgattttccatgcaagaaaatttattaaagcccatgctaattcttctaaaatgtagagcatggacaaaagatcctcccgtgcccaaactgtctaatgaaaagttggcataatcttcttttaggaaatagtcctcatctgggatttattcttctatttgtgataccagatatatgaacccagttagactgggtagatctacattagtttcttgctcaactatatgagctaaaacttgttcttgtttgttaccaattaattgctgagaatatggataacagggcgaattatataatcattatacgatgttcctcgttattattatgaaaccaatatgatattttagatgttaatgtccagtactatgatttcgtaggttcgttacctgaagattatcgaaaaaagtgggtaccaggctcttccatgggtgagatacatcacaatggctggggagtatgaactaaggctcgtatgaaaattacttaatttgatttatagacatttcgttcttcagagttcatatgtcgtgaattattcagttaataatcacaggatgagtcaaagatttgttgttgtagagaatttggtgggcgaagaaaaattctgttttctactcttctttttgtttgtgaagcatattgcagcttttgtaagtccatatagtaactgagaaagtggtctcttttttcttta

SEQ ID NO: 17 - DNA, 4167 bp, Cucurbita pepo
  source 1..4167: mol_type = genomic DNA
cttacgccgaacatgaatttatttatcagaaaaaagaaaactcccaattgcaaactaaaataactcggaaattggaacatcttgccgcagatcgtcctctagtaatggttgagcgtcggaatccagatgacacaagtttctggcgcgacgatgtgccgaattgattcaagtagatctaccgttctagccagttgattcttctgctggacatcgcgagatctccttcaagttcttatgctctccttgttttcgcgaacaacctagctagccggaggaagaattgtttctagtgatttacaaaccgttttctgatttgaatcaatggcgggggcggcctccgcgctgttcctattagacatcaaagggcgtgttctcatttggcgcgattatcgtggcgatgtctcggcagttcaggccgagcgcttcttcaccaagctcatcgagaaggaggttctggatctttgtttaatttgatcggtccctggtagaactatagtcttattttctttttagggcgagcgatttagtttctgtttactagtaaattggtgataaatgcgattgaatcagagaaattggaggtcctcgtatcggatttgtttctaattatatctttaggaagcagattcaaacaaagaaatgtcaaataaaatgatttgaatctctatctaacaaaattttcaaaatcttttgatgtcagggtgatccgcagtctcaagatccagtagtttacgataatggaataagctacatgtttattcagcacaataatgtgtacctgatggttgctgcgaggcagaattgcaatgctgctagtcttctttcctttttgcaccgagtagttgatgtaagttgtatatatgatcagagcgttctccaacaacgtattttggtatttcaaacatgtttaatttggattaatgatagtgtacccataatcttagttcctaaagttacaaggttcaataagactttggataggatttctaaaaattcaaggctacttaggatcttcattttctatcaacaagaggagaataattttttgtccgattagcttacctttctgcgttgtgtctgtggtaaatggtaatgaaattccatttgtgttttccttgcaaaatatatagaatgtaggtaggttttgggacttctgagcaaatatgtttcatgagaaagaaaagaaataaattattgacatgaatcggtataccacaggtcttcaagcattattttgaagagctggaagaagaatcgcttagggacaactttgttgtggtggtaagatatgcctttcaccgatcgaatccttataaatttcttaaacttttaccatagcatgtattgtgatttatgtcaggtggtgaatgataatcttaatgcttatattctttgtagtatgagttgcttgatgaaatcatggattttggttatcctcaatacaccgaggcaaaaattcttagcgagtttataaagactgatgcttatagaatggaggttgctcagaggccacccatggcagtaacaaatgcagtttcttggcggagtgaaggtataaattacaagaagaatgaggtatgtgttctttgaaagaataagctgcatatgttcatttgtgattcttaaagcttagtaggtaatgtactgttcttatttctccaggtctttttggatgtggtggagagtgttaatatacttgtcaacagtaacgggcaaataattaggtcagatgttgtgggggcattgaagatgagaacttacttaaggtctgctctcatagtggtttgcgaaatttacatcttgacacggaaaaagcttgtacttcgttcacttccatattgcacacaatatcctcaaaagtactttgtaatcaagaaaaagtttttagtcttgcatacatcttgttattggtttgctctctcttttactttcaattaagaaatgattttaaactgttctagcaaactctgaactgggaaactaaaccgttcagaaagtatgatctatttaatcgttctagcgagcttagaagaagtgttaactttgaaaaatgtgaatattgtctatgcggtattgtcgaggtcttcatttctttgctttctgttatttcaatgctttattattatgtacataagcacttattcgtaacttggccttctggtattgttgaaaccttcatttctttactttccagtctccccattcaatgactttttataatatccttctcattccatttgtatctttgctagttgatttgcagaaattaaggtttggttttgtttattgttgtagtggtatgcccgagtgtaagcttgggctcaatgatagagtattattggaagcacaaggccgaaccacaaaagggaaagctattgatttggaagacatcaaatttcaccagtatgtattaccatatggtgtattcattttcttgtactggcaatatctgtgcattttgttggattcggatgctatatatagtaatgtatgacttcataagtgttaggtcagtttatatgttatctaagcatcgaaccaaatgctttttttaggtgcgtacgtttggcccgctttgaaaatgatcggaccatatccttcataccaccagatggagcttttgatctcatgacttatagactgagcactcaggtttgatatgttcacgtggatgctattttttaagtcacgttggtttatttattgcttccttttatcttgtaatttgatgtgcttcattgtttttatcgacaggtaaagcctcttatttgggtagaagctcaaattgaaagacattcaaaaagtcgtattgagattatggtaaaagcaagaagccagttcaaggagagaaggtattaacctttaaaaaattaaaagaaaaaaaaaacaatcaaaagtaaggtttgaggggggtcagtacaaaaattatcttcctagtttctttttactaataaaaagttaatcatacagcaccgcaacaaatgttgagattgagttgcctgtgccagcagatgctaccaacccaaatgttcggacctcaatggggtctgcttcttatgcacctgaaaatgatgcattatgctggaaaataagatcttttcccggtggcaaggtatttaaaatttcatttgcatgtctgtgaacgcttaccttaccttatgcatgaatagcggatgattcaggaagctaattttgttgatcttaatctggaaaattcaggagtatatgttaagagcagagtttcgccttccttcaattacatctgaagaagcaactccagagagaaaggcgccaattcgtgtaaagtttgagataccatacttcactgtttctggaatccaggtagggtttctttatgctttctctggttagtcatgtttaccattcagtgacatgataactcctctttcttccctctgattttccatgcaagaaaatttattaaagcccatgctaattcatctaaaatgtagagcatggacaaaagttcctcccgtgtccaaactgtaatgaaaagttggcataattttcttttaggaaatcgacctcatctgggatttattctgctatttgtgataccagatatatgaactcagttagactgggtagatctacattagtttcttgctcaaatatatgatctaaaacttgttcttcttgtttgttaccaattaattgctgataatatgaataacagggcgaattatgtaatcattatggagttgaataagtataaactttggaagatacgttgttcctcgttattgttatgaaaccaatatgatattttagatgttaatgtccagtactatgatttcgtaggttcgttacctgaagattatcgaaaaaagtgggtaccaggctcttccatgggtgagatacatcacaatggctggggagtatgaactaaggctcgtatgaaaattacttactttgatttatagacatttcgttcttcagagttcatatgtcgtgaattattcagttaataatcacaggatgagtcaaagatttgttgttgtagagaatttggtgggcgaagaaaaattctgttttctactcttcttttgtttgtgaagcatattgcagcttttgtaagtccatatagtaactgagaaagtgatttcttttttctttattttctttcaactagctcttttttttttt

SEQ ID NO: 18 - DNA, 7347 bp, Daucus carota
  source 1..7347: mol_type = genomic DNA
  misc_feature 1064: note = n is a, c, g, or t
  misc_feature 1074..2286: note = n is a, c, g, or t
atgtcaggtgcggcctcggcgctgttcattctcgacatcaaaggccgcgtgctcgtgtggcgcgattaccgaggcgatgtcaccgccgtccaagctgaaaaatgcttcaccaagctcatcgacaaagaggtgaataatcatattcgtgtgttttgtgtttgtaatggtgatgatgatttgtcgatttcgtgttttacggttttatttattggctgatctgtttgtttcgttttagcgaaaaagtgaatcatgcacgtttataagttaggtagctgtgttaagatcaggctgctacacggaagatagttagttagttgcttaatattagctagactttgatgtacgtttcacgaggcttactaattttcgttgtatgttaatgtagtgagaagtgattcatgtgatttgtaagttgactctgcaattcggataggtagtctggtgcttaatattagctaggattggatttacaatctttggcttactaattttattttattcaacgtatcatcagtgtcatgcttctggtttgaactatgcaaatttcatacttacgtatttacttagttttgcagttttcacagttttgcctctgattatccccagtctccactgagattagagatgagttgtcgattttatttccacggcttgaattagttcattttgtttgtcaattgttctgttttctttttccttaataaagtgaaaagagaatcacgcaattcattatgtatcaattggtttttgtgatggagatgataatttgtcgattttgttaattatgattttttgttcagttttttggctggttgatctgtttgttctgttaattggttaacacggagcagaaaagctaatctgcaattcataagttgaatagttatgttgagattagactacgacatgtgagctagttagttgccaaatattagttccaatttgatttacacgtgaaaatgaaaataaaggtgattcataagttaatcctgctgtagttcaattcaagtagctagttagttgcttaatatatgctcaactcagatatttggatttaagtcganctagtgaaannnnnnnnnnnnnnnnnnnnnnnnnnnnnnnnnnnnnnnnnnnnnnnnnnnnnnnnnnnnnnnnnnnnnnnnnnnnnnnnnnnnnnnnnnnnnnnnnnnnnnnnnnnnnnnnnnnnnnnnnnnnnnnnnnnnnnnnnnnnnnnnnnnnnnnnnnnnnnnnnnnnnnnnnnnnnnnnnnnnnnnnnnnnnnnnnnnnnnnnnnnnnnnnnnnnnnnnnnnnnnnnnnnnnnnnnnnnnnnnnnnnnnnnnnnnnnnnnnnnnnnnnnnnnnnnnnnnnnnnnnnnnnnnnnnnnnnnnnnnnnnnnnnnnnnnnnnnnnnnnnnnnnnnnnnnnnnnnnnnnnnnnnnnnnnnnnnnnnnnnnnnnnnnnnnnnnnnnnnnnnnnnnnnnnnnnnnnnnnnnnnnnnnnnnnnnnnnnnnnnnnnnnnnnnnnnnnnnnnnnnnnnnnnnnnnnnnnnnnnnnnnnnnnnnnnnnnnnnnnnnnnnnnnnnnnnnnnnnnnnnnnnnnnnnnnnnnnnnnnnnnnnnnnnnnnnnnnnnnnnnnnnnnnnnnnnnnnnnnnnnnnnnnnnnnnnnnnnnnnnnnnnnnnnnnnnnnnnnnnnnnnnnnnnnnnnnnnnnnnnnnnnnnnnnnnnnnnnnnnnnnnnnnnnnnnnnnnnnnnnnnnnnnnnnnnnnnnnnnnnnnnnnnnnnnnnnnnnnnnnnnnnnnnnnnnnnnnnnnnnnnnnnnnnnnnnnnnnnnnnnnnnnnnnnnnnnnnnnnnnnnnnnnnnnnnnnnnnnnnnnnnnnnnnnnnnnnnnnnnnnnnnnnnnnnnnnnnnnnnnnnnnnnnnnnnnnnnnnnnnnnnnnnnnnnnnnnnnnnnnnnnnnnnnnnnnnnnnnnnnnnnnnnnnnnnnnnnnnnnnnnnnnnnnnnnnnnnnnnnnnnnnnnnnnnnnnnnnnnnnnnnnnnnnnnnnnnnnnnnnnnnnnnnnnnnnnnnnnnnnnnnnnnnnnnnnnnnnnnnnnnnnnnnnnnnnnnnnnnnnnnnnnnnnnnnnnnnnnnnnnnnnnnnnnnnnnnnnnnnnnnnnnnnnnnnnnnnnnnnnnnnnnnnnnnnnnnnnnnnnnnnnnnnnnnnnnnnnnnnnnnnnnnnnnnnnnnnnnnnnnnnnnnnnnnnnnnnnnnnnnnnnnnnnnnnnnnnnnnnnnnnnnnnnnnnnnnnnnnnnnnnnnnnnnnnntgtgtgtgtgtgtgtgtgtgtgtgtgtgtgtgtgtgtgtgtgtgtgtggagtcttactctagcacaaaccactaaatacaaactaaaattcaaaccaatgcttttaagagaatggggagtttgtgggatccgaggacagaccccgagctgggacttgacaaggcctatgtggggcctagtgggaagagggtggggtcaagtaagtattggcttttgaacttgtctggagccctccaaaggcctgtccggagccttagtgaggctttagtggacccgaggtggatcgagcgggtccgaggtgggtcacgggtgggtgatgacatataggactagtgtctcttggtttgtatttaaggtttgtatttgattattaacctatatgtgtgtgtgtctctgtgtgtgtgtgtgtgtgtatgaaatttcatgtcaatttcacatttatttaatttcaattatctgttaatgcagagaaaaaaagaatcacatgattcgtaagttgactaattacattaatattactctattattgggagagctagttagttgcttactactagctcgaattagatttacaacggtcttctagaaaattctgcctatgcttaattgtcacttaatgatttttagttttgcacttgccacttaaatcgttgttaaagagggtttttttcgtcgtattaacgtgctttctgtttattgtgacagaaaagatgaaatgtcaatttcgttattaaagttttttgtgcgttttattggctggttgatctgttcgttttgtttattcgctaacccagagcggaaaagtgaatcacgcaattataaaagttggatagttatgttaagattaggctatgagtctatgacatggaagctagttagttaattgctttatattagctcaaatttgatctaagttgcagactttatcattgtcaatttataatcacttcattgttaatttcagtcgtcctaattggaaattagaattacatgatttataagttgaaaacggattagctaattagttgcttaatattggctcgaatttgatatatgttgtagcgactttatcatttatcatcgttaatttcaggcttactaatttccattgtctgaagcgacaaggagactaccatgatttataaattatgacttgatcctaaaatttgaatagctagttagttgcttaatattagctcaaattggattttcattaatctatctaaaaagttaatgcttacatattacagttctttgttaaagtagcaaaggaaaaaaaggtgatgttaatattacttattgcaatatcatgcttcctatattcacttattaactgacatttttacgctatttattttggaatttcatgtttgcttaaagaccactgatagtagagatgttttttcaagttcatttttactgcttgattataagtgagagccagttaaatacttaagcttagctcaaatcagattcatattcatcttttatattgtcgaatgtatgtgaattccactgaacttcttgctactggctgtgatgttttgatttagggagaaccagatacacagaatccagttgtgcatgatgatggcataacttatatgtttatacaacacaataatgtgtatttgatggctgcatcgaggcagaactgtaatgctgccagtatattcttatttctacaccgcgtagttgatgtaagtgtatattcaagattatttatttcacataatgagtggactgttttatcttgtagttgatgtaattcagtttcaattgtttgttttggtgacaggtatttaagcattatttcgaggagttagaagaggaatcacttagagataatttcgttgtagtggtatggtaaactattattttatttactgtaaccttgattattagtactatatatagagaaaaaggtaaaaattgtgtggatgttatggcgctgatacatattttggtatgtacagtatgagttacttgatgaaatgatggactttggttatccccaatatactgaggcgaagattcttagtgagtttattaagactgatgcatacaggatggaagttacacagaggccccctatggcagtgacaaatgcagtgtcatggcgaagtgaaggaattcgttacaagaagaatgaagcaagtcattttatgtgtaaatatatcttaacaagatttggaagtaaatttggccagaaaatagttaagagtttttttttgctctacaggtatttctagatgtcgttgagagtgttaatatacttgtaaacagcaatggacagataatcagatctgaagttattggtgcattaaagatgcgaacatatttgaggtaaactttatgctgaattctgatattattattgaaaaaactgtcctggcttctgttgtttgattatgtttttaaaatttggttgacgcgggtgtacgttgccaagtgtaaggtcttattgaaattaaaaaataagaccttatttggtgaatgcatattatgatatgcttactgcttgcagctagcactggttttctttttcaatattgcaatatgagaccactgttcatcatttatattatatattctggaacaagggcagtttttctatatataaggaagatccactctgttaacacgagtattgacaaagtctatctttacatgaatggatctatattatttgggagtgcttagctataagttaacctttggatttcattatgcttatatgagctattgctcttctatttaagcgttgtagtccagatggcaaccgacacccaaatattgtgatctttttatgtttttgctactctaaatatgtatcgtcacttaactgatttcctctgtttctatctatcgcagtggtatgcctgagtgcaaacttgggctaaatgatagagttttactagaagcgcaaggacgagcaaccaagggaaaggccattgacttggatgatatcaaattccatcagtatgccattcactctttttctaagttacactttatgttcctaaaattgttgtaaatagttttgtatgtatcatgtactatgagtatattgtgtttaaatccttcattttcacattgccttatattttttattgttgctatctggggataaataccatatttgaacaggtgtgtgcgtctttctcgatttgaaaacgaccggacaatatcatttataccccctgatgggtcttttgatctaatgacatatagacttagcactcaggtataccttgtagacactattttcctttgtcgcccttttgttcttatcttcaccttgtagcatgttgtaatgaagggttgaattttgaattcaggttaagcctctgatatgggtggaagctcaagtggagaggcattctagaagtcgtatggaaatcatggtaaaagcgaggagccagttcaaggaaagaaggtatcgtttgtttctttggcacacaacaatatctgtgaagtcctaattccaaggcctgctgtatgagctagtttatgattgcagcactgcaacaaatgttgaaattgagttgcctgtgccatctgatgccatcaacccaaatctacgaacatcaatgggatctgcttcttatgcacctgaaaatgatgcattgctttggaaaatcaaatcatttccaggtggtaaggtaaacgttagctatagatcagctatatatccttctttgatatatataatttgttctttgtgaatatcatctgaatgtttgatttttttgactagtgtaggaatatatgttgagagcagagtttaatcttcctagtatcacagacgaagaagcagctccggagagaaaggctcccatacgagtgaagttcgagataccatattttactgtttcaggaatacaggtgtgtcctcatgcatatgttttactgtatcaatatagggaacgcttggatgtcatattttctggttccttctgttccagttgcaacagaattttatttgccttttgcaccaacaaaaagttatataacagaaaagcctgttaagcagatacatcctcctcctggaattgtttgtatatcagtgccaagggcctgttatgcaagtcttcagacatatatgtagaataattattaaaaagaaatttggaacttcatacaagtatgttatataatattttttcgattgaaattggttattaacttgcagggctttattctcataatccctttatacattgtgttcttattttttctacctaaatatattagatccgggaattctgctttatttatttataaagttgtctcgtatcttattgtatcaagacaaaagctattaacttttggaaaagtgatgactaatttgtacatcagtgttttaatttttaaatcttcttattaactcaaaatgatgatttggtcaataaacaagctgagggaaattctagagtgctcatctttgcgttgtaaaaagttgttagatgtgaactagagttttgatggagtcaaaagtgtgcgagctcaggtaattaggaagaaccattcacaaacagtgccaatttagtatgatataactccaagaaattccgtgtatgatataacagtgcaagtatgcgactcctagtgattgagtacattgatttgtatgccaacttagttttgtagcttaatgagatgactgcatttcgtttttattgtaagagattttcagagagttcacgtagattatctgtatatgtaggcatgttaggtcttttcttatacactttagtcctgtagctaattatatcgtggaaaggggagcgatgttgtttatacatattgtttagtttttccaagttggttcttattgttttcaacctgtttaatgaaaaggtatcatctgtctctctctctatagctattgtgtcaactataagagctttagttggatatctcatattcgagattcatgacaatattggggttttgtaggtccgatacctgaagatcattgagaagagtggctatcaggctctgccatgggtgagatacataacaatggcaggtgaatatgaattgcgactcatgtga

SEQ ID NO: 19 - DNA, 2750 bp, Eruca vesicaria
  source 1..2750: mol_type = genomic DNA
gaatctgaatcgagagcaaatcgtcagatcgtgaataaaaaaactttcatcgaaaccagccaaagctgcagcatcacgacgacgaagatgatctcagctcattcctctctttgatccttccacctcctgctgtgaacatacagatctcgtcttttccgtttgatcggatctgattcgtaatcgcaacaacaatccctagagaaacaacatggcaggggcggcctccgcgctgtttctgctcgacatcaaaggccgtgtcctcgtctggcgcgattaccgcggtgacgtcaccgctgctcaagccgagcgtttcttcaccaaactcatcgagaaagaggtcccttccctttataagattctctcgtgtcttgttgatgagtttgctcttatgttcatagattagaatccgaatcagtaatcaattgcttgctaataataactataagatttctctcgtgaataggattagaattttttgagtgagtattatcattagcttaatgatcttttgcagggagattcggagtctaatgaaccggttgtatacgataacggagtgacctacatgtttgtacagcatagtaacgtttacctcatgatagcttctaggcagaactgtaatgctgcgagccttctcttcttcctccatcgcgttatcgatgtagccacccctttgatcttctgtttccctactgtttcactactgtttctaataataaccgatcatttaagtgttttttttttgtatactgagttttaggtcttcaagcattactttgaggagctggaggaagagtcattgagggataactttgtggttgtggtatgtttactgaatctattatagtacttcttcgatgctagatgttacttcttctcttgatgaatatatgtgggtgaggaaaacaaatattagatgctgaaattgacttttgttgctggcagtatgagttacttgacgagatgatggactttggttaccctcagtatactgaagcgaggatccttagtgagttcatcaagactgatgcttataggatggaagttacgcagagacctccaatggctgtcactaatgctgtttcttggaggagtgaggggttacagtttaagaaaaacgaagtgggtgctttttagtttacaagcaggaaacatttggtttaggtccccaaatgttcacacagtgatggtttgtttttcaggttttcttggacgtggtagagagtgtaaatatccttgtgaacagtaatgggcagattgtgaggtctgatgtcgttggagcattgaagatgcgaacatatctgaggtgcgttttctactgttctatatcatccaaagcatgttagatcaacaattcacccctctttgactctcttccttttaatccatgggttttacagtggaatgccagagtgtaagctaggtttgaatgatagagtactgttggaagcacagggaagagcaacaaaaggaaaagctattgatttggaggacatcaaatttcatcagtaagtttatccggatcactgtttttgtattttactcaagaaaatatactatacttgagttttacatgtgtctttcttcaaagtacaggtgtgttcgattggcccgttttgagaacgataggacaatatctttcataccacctgatggggcttttgatttaatgacatatagactcagtacccaggtttgaaatgtggactattgcacggatgatttttttttttcctcttcttaaacaaacatgaaattttctttctttttgacattatactttattcaggtcaagcctcttatatgggtcgaagctcagatagagaggcattccaggagtcgtgttgagatgttagtcaaagctagaagccagttcaaggaaagaaggtaactagtaatccttgtttgactttgtttgattttgccttttaccataaaacaattcaagtagagttgcttattttgtagcactgcaacaaatgttgagattgagttgcctgtaccaactgatgcatccaaccccaccgtaagaacatctctcgggtctgccgcatatgctcccgaaaaagatgcattggtttggaaaatcaaatctttccctgggaacaaggtaagagcgtataaatttttttaacgcaagaactgagcatataatgttgaatgctttgacaaattagttttgaaacaatgtaggagtatatgttgagagcagagttccatctcccaagcataactgcagaggaagccacccctgagcgaaaagctcctattcgtgtcaaattcgagatcccatatttcactgtttcaggaatacaggttagtttctatgtatatatatatcgggtagtttctatgtttctgcacttaaaactgaagagtcctgatgcgtgtgggtattgcaggttcggtacctgaaggtgattgagaagagtgggtaccaagctcttccgtgggtgagatatataaccatggctggtgagtacgaactcagactcatgtaacatgagctttgtgttgttgtttcttttgtttttatttaaagccatatttgtcaacgaaagaaagcagaggaagatggaagaaaaggaaaaaaactttagctgataaatttttacggtgaaaggttgttttagcagccaatatttcttgtgaattgtttcatggtgtttctctttatgttttctgtaagcttttaatgacactttttaatctttgttaaaattgttaaacaacgagcatttttctaatgg

SEQ ID NO: 20 - DNA, 2741 bp, Eruca vesicaria
  source 1..2741: mol_type = genomic DNA
ctgaatcgagagcaaatcgtcagatcgtgaataaaaatactttcatcgaaaccagccaaagctgcagcatcacgatgaagatgatctcagctcattcctctctttgatccttccacctcctgctctgaacatacaatttcttcagatctcgtcttttccgtttgatcggatctgagatatcgcaacaacaatccctagagaaacaacatggcaggggcggcctccgcgctgtttctgctcgacatcaaaggccgtgtcctcgtctggcgcgattaccgcggcgacgtcaccgctgctcaagccgagcgtttcttcaccaaactcatcgagaaagaggtcccttcccttttataagattctctcgtgatttttaatctctcttgttgatgagtttgctcttatgttcatagattagaatccgaatcagtaatcaattgcttgctaataataactataagatttctctcgtgaataggattagaatttagagtgagtaatcattcattagcttatgatcttttgcagggagattcagagtctaacgaaccggttgtatacgataatggagtgacctacatgtttgtacagcatagtaacgtttacctcatgatagcttctaggcagaactgtaatgctgccagtcttctcttcttcctccatcgcgttatcgatgtaaccatccctttgatcttctgtttcactactgtttctgatgataaccgatcatttaagtgttttttttttgtatactgagttttaggtcttcaagcattactttgaggagctggaggaggaatctttgagggataactttgtggttgtggtatgtgtactgcatctattatagtacttcttcaatgctagatgttgctttttctcttgatgaatatatgtgggtgaggaaaacaaatattagatgctgaaattgacttttgttgctggcagtatgagttacttgatgaaatgatggactttggttaccctcagtatactgaagcgaggattcttagtgagttcatcaagactgatgcttataggatggaagttacgcagaggcctcccatggctgtcactaatgctgtttcttggaggagtgaggggttacagtttaagaaaaacgaagtatgcgcttttggttttcaagcaggcaacgttttgtttaggtctccaaatgttgatgttttgtgttttccaggttttcttggacgtggtagagagtgtaaatatccttgtgaacagtaatgggcaaattgtgaggtctgatgtcgttggagcactgaagatgcgaacatatctgaggttagtgttttagtgttatatatcaaccaaagcatgttagatcaacaattctttcctttttgtctctctgcttcttaaattatggttgttacagtggaatgccagagtgtaagctaggtctgaatgatagagtactgttggaagcacagggacgagcaacaaaaggaaaagccattgatttggaggacatcaaatttcatcagtacgttttcctcttgcaactccaaacactctctgacagtcgcttgaggtttacatatgtctttcttcaaaatgcaggtgtgttcggctggcccgttttgaaaacgataggacaatatctttcataccacctgatggggcttttgatttaatgacatatagactcagtacccaggtttgaaacgtggactaatgcacagatgattttttcctcttcttaaacaaacatgaaattttatttcttttacttgttcaggtcaagcctcttatatgggtcgaagctcagatagagaggcattccaggagtcgtgttgagatgctagtcaaagctagaagccagttcaaggaaagaaggtaactagtaattcttgtgtgggtttgtctgattttaccttttaccataaaaaaattcaagtagaattgcttttctgcagcactgctacaaatgttgagatcgagttgcctgtaccaactgatgcatccaaccccaccgtaagaacatccctagggtctgccgcatatgctcccgaaaaggatgcactggtttggaaaatcaaatctttccctgggaacaaggtaagtgcttgtaattttttttttgtaagaactgagaatataatgttgaatgctttggacaataaaatttgaaacaatgtaggagtatatgttgagagcagagttccatctcccaagcataaccgcagaggaagccacccctgagcgaaaagctcctatccgtgtcaaattcgagatcccatatttcactgtttcaggaatacaggttagtttctatgtatatatatgtatatatcgggtagtttctatgtttctgcacttaaaactgaagagtcctgatgcgtgtgggtattgcaggttcggtacctgaaggtgattgagaagagtgggtaccaagctcttccgtgggtgagatatataaccatggctggtgagtacgaactcagactcatgtaacatgagctttgtgttgttgtttcttttgtttttatttaaagccatatttgtcaacgaaagaaagcagaggaagattggaagaaaaggaaaaaaaatttagctgataaatttttacggtgaaaggttgttttagcagcccatatttcttgtgaattgtttcatggtgtttctctttatgttttctgtaagcttttaatgacactttttaatctttgttaaaattgttaaacaactagcatttttctaatggccactgtgttcttcctgtt

SEQ ID NO: 21 - DNA, 5678 bp, Glycine max
  source 1..5678: mol_type = genomic DNA
tactgttttattgtttattgctgggacggcgtcgtatggtcacgcctcgcactcgcgctctggagtttcaacccaccgcaccgcgccccgaatcgaatccaacatacgtttccaacgatagacagaagaaacaaaatccgaagctccaattcctcctaactgcagtagtaaccgaaacccgatgaccctagccatggtttagcttcaaacatggctccctgaaccctagcatttctccctcttcgcaacaacgccgatccgatcccgatccctttctgattccgatccgatccgatccaatggcgggggcagcctctgctctgttcctcctcgacatcaaaggccgcgtcctcatttggcgcgactaccgcggcgacgtcactgctgtcgaagccgaacgcttcttcaccaaactcattgaaaaagaggttcattccttcttttctccaatagatgattatgactattcatttatctatgctcgtgcagctccaattatcttcattttgtttccggtgctgttttgaacaatttgtttctgatgtttatttgttcttttttatgcattattgatgtttgtgttaatagtggtgcaattgggattgagaatatggattgttgcatagtgaggttttgttttgaaattgtcgcagggggatccgcagtctcaagatccggttgtgtatgataatggtgtgacctacttgtttatacagcatagcaatgttttcctcatgatggctaccagacaaaactgcaatgctgctagcctccttttcttcctacatcgtatcgttgacgtaagtgttatttgtagttatggttttaaattgaaaatttggtttgatttggagtgataatgattgatgggaatggtttgtgtctgaggtaggtgtttaagcattattttgaagaattggaagaggagtctcttagggataacttcgttgttgtggtaaagtactagtgtgcctttgaacacagtttctttatgatttgaattgattctgctaggtaaaatgctgattacacatgtcctttgcagtatgaattacttgatgaaataatggactttggctacccgcaatacaccgaggcaaagatacttagtgagtttatcaagacggatgcctataggatggaagttactcagagacctcccatggctgtgacaaatgctgtatcctggcgcagtgaagggataaactacaagaaaaatgaggtgggcattagaatatcatcttgacttgtagtttcatggtctaggctacccattaatattgttcttttctttttccttttccaggttttcttggatgtggtggagagtgttaacatacttgtcaatagcaatggacaaataattagatctgatgttgttggggcattgaagatgagaacatatctgaggtttgctttatactttctctgagaactagagtttcaagccattgacatgagctattagttaattgggttagtgatatggtttacatttttttaatcttgaggggattttggggggttgggtagatcatattttatgaagagtgaaaattgaagaagaatacaacataggagaatcaggaattccttcaacaggtaaaaaatgaaaaaaaaaagaagctaaaaagagcactctgatttctctgaatatctcacaaaggaactcccttaaaaaaccacacatatgaaccaaatgtgagcagggaagactattggtttgagggaaaattcaatgctgtagaagtttacagtggcaaactttccagtagcttttatggcaatctttacaagcaagttgtcaccactggcaaactctccactctccagtgacttttatggcaatttcttttagcaagttgtcactgccagtgaacttttttgctaaacttccagaaaaattctctgacaatatttcaggcaagcttcaactcttggttacgtttccagcaacttccggcaaactttcgactacttttttggcacccttcaagtgccgttgaacttcttcagagaagttattctccattacccctattatgtgatctctttcataaattctcagtcattccaatctccaactgcctccccattactagttgtgtcaactccagctttgtggacgtgtgcctggtgtattttatcttatttctacatttgttattgaattctctgattctgtttggctccgctagctgcatttttccattatactaagatctaatatgttatctctttgcaagatttgatgtgttttcagttcttggtgaatttggagaagttttctagttctgatactttcgaccaactattcataataataatcatttttgccatttggttgtgttgtctttcagcaatgcccatttctccaatgtctccagcatccctatgttgccttttcaattgcctttactctgtagtggatcccattttgtatttatctatattttgtaaagggtttatttgcaacaaccttaaagcttactaagctttagcttaagggggatcaatataatcacaggtggttcacgtgtctctcacaacttgttaattgcatttagggttcataagaactagtatctaggaagtagcagtccatttattcttagcccaggaaacaatactcacttagtccgtatatataaatgttatgcatgatgtactgcatacagaaagcagctttactcaagttattccatcctatcaccctctctatttgtccctttctttccctctaaactctacaagcactataccttgctggcatattttcttattttgtgctgtaagcctgtagcaaggttccccccatcaaaagtacaataaataatgagcaaacatcctatggtactcccagctcaatttgcatctgtgtagacttctatttgcaaatctccatgcttcatacagcctctttgttcctggtgaccctttttggtcaatcaaaattctataaacagctacaaagtgttccagtcctggtgattagggtaattaggccgaatatcttgttgatcttgttaagttctttccctaattataggaaaactcttgtacagagtttctatatatatgaaagggttgactctctttcctaagcaagtcttcaatcaaatatttgctccttgtctctgtttcaagtatgagtttctacagctttacaccttaacaacccgttctccattttagtggggctattgccagtatgaggatgtgatgaatctggatgttcttccttcctattggttctgattctcttctctcgtaatttcctactattcctccccctatttgatgggcatgttaactctgcctgttcatttcatctctttgaatgattaatcaagttgtattttcctttccagtaattctaatgctattatattcagttctgagatttcaagtaatcttacagctagtttatataaattgatttcaagtaatcttacagatagtggtttggatttaggtagactgtacattcattttgaaatatctattaatgttattgaattctgtgctagagtattattcaatccatggtttgtacaatgcagtggtatgcctgagtgtaaacttgggttaaatgatagagtattattagaggcacaaggtagaacgaccaagggaaaatcaattgacttggaggacatcaaatttcatcagtatgtatgcttgattctcttccttgtattcactgattcataattgcgtgtgcaaattaaaatatatactttctacaagcttgtttatgtctattcttgactaattctcaaattatgtgccgcacttgacaaaggtgtgtgcgtttggcccgatttgagaatgatcggacgatttcatttatccctcctgatggatcatttgatttaatgacatataggctcagtacacaggtacatcttctcttgatatgaaatatatttctgtttgagtggcaacataagaattacataattacactcattctaaaaaaataacaattctatgtctgttgattctttgatctttggttgcaggttaagcctttagtttgggtggaagcacaagttgaaaaacattcaaaaagccggattgagattatggtaaaagctaggagccaatttaaggaacgcaggtgctgttattttttcttttcccttttatatctgttcctttttcctttgatttttccttcatgaaagagagagaactgcttaccttaaatttatgtactgactcaatgagtggtctgctttagattttagaccactctatatgtatttacttctccaactactcagagaatttaattttacagtactgccacaaatgttgagattgagttgcctgttcctgctgatgcaaccaatccaaatgttcggacttcaatgggatctgcatcatatgcacctgaaaaagatgcattaatctggaaaataagatcatttcctggaggcaaggtattaattaactaggaaagtgcattgtacctatgaataacatccataattgatgccacaatttgattgtgagttaatggatttggttctcttatttgatacttcaggagtacatgttaagggcagagtttcgtcttcccagtatagtagatgaggaagcaactcctgagagaaaagctcctatacgtgtaaaatttgagataccatattttactgtgtctgggatacaggtattgctccgtgtactgatgtacaatcttcttatattctgaatattgttatgcctgtatgcatctctatcttattaaaagatgaatatttcctgtattttatatctcacacttttccccattggtgtctcacttgtcattttgattatttctctaggcatgaagttgccattagtgaactagatgaatattttgaaattcatttttttcacggttgaattgatattgagttcacaaaaaatgtttatagataaatattaaattgtaaagtaaataataattactaattactaatgggaagaacttgacatcataaatggatgagaaactaatataaatactaccaggtaatctgaatgaaacataaatatccacatgatatactgttgaattattgtttaaatgaggttttgactcaaggtgctaatcaaccatgtacatgttttgatttgtaggtaagatatttgaagattattgagaaaagtgggtatcaggctcttccatgggtgagatacataacaatggctggagagtatgaactgaggctaatttgagatttgtgtccttgtttggtattcacaaaataaatgtgtcattccgtgatcgtggatggaagagggagtctcgagtcattaattttttaccaaccccatatgagttactaattgtctagaaagttgttgcagctgaaaattctgagttggaaagtgtgagccgaaactcttgcaagtcccttcggtcaaatctgttttgattgggaaaatgattcgttctccctcttcatttttaggccttttttgtaatcacaatgtgtcgatctttttccaacgtcttcaaattgtaatctgatatacattttaaagagaatcatagggttttgtattagcaagtaaatgatttctacagacaaattatagatagggaataattgtccctcagccatgtatgaacgacaaatttttaaatatttattcacagttttacagataaatgcataaaa

SEQ ID NO: 22 - DNA, 10207 bp, Glycine max
  source 1..10207: mol_type = genomic DNA
tcacacacctcgcactcgcgctccggagtttcaaccccgcagaccgaatcgaatcctccaacatacgtttccaacgatagatagacaaaacaaaatccgaagctccaaaattcctcctaagtgcagtaaccgaaacccaatgacccacctagccatggtttggcttcaaacatggctccctgaaccctagcgtttctccctcttcgccaacaacgctgatccgatcccgatctgtttctgattccgatccgatccaatccaatggctggggcagcctctgctctgttcctccttgacatcaaaggccgcgtcctcatctggcgcgactaccgcggtgacgtcaccgccgtcgaagctgaacgcttcttcaccaaactcatcgaaaaagaggttcattccttctttctaccattatatgattattcatttatctatgcttctgcagctccaattgtgtgcactttgtttccggtgctgttttgaacaatttgtttctgctgttttttttatgcattattgatgtttatgttaacagtggtgcaattaggattgagaatatggattgttgtatagtgaagtttgttttgaaattgttgcagggggatccgcagtctcaagatccggttgtgtatgataatggtgtgacctacttgtttatacagcatagcaatgttttcctcatgatggctaccagacaaaactgcaatgctgctagcctccttttcttcctacaccgtatcgttgacgtaagcgttattggtagttatggtttcaaattgaaaaacttttggcgcaataacgattgcttggaatggttttcgtgtctttgaggcaggtgtttaagcattattttgaagaattggaagaggagtctcttagggataactttgttgttgtggtaaaatactagtgtgcctttgaacacaatttctttatgagttgaattgattgtactaggtaaaatgctgattagatatgtccttggcagtatgaattacttgatgaaataatggactttggctacccgcaatacactgaggcaaagattcttagtgagtttatcaagacggatgcctatagaatggaagttacacagagacctcccatggctgtgacaaatgctgtatcctggcgcagtgaagggataaactacaagaaaaatgaggtgggcattagaatatcatcttgacttatagtttcatggtctaagctaccaattaatattcttctcttctttttcccttttcaggttttcttggatgtggtggagagtgttaacatacttgtcaatagcaatggacaaataattaggtctgatgttgttggggcattgaagatgagaacatatctgaggtttgcttttatactttctctgagaacatatctgggggacatattttatgaagagtgaaaattgaagaagaatgcagcataggaggatcaggaattccttcaaccagtcaaaaatggaaaaaaataaatgaattaaaaagagcactctgaatatctcacaaaggaactcccttaaaaaaccacacatatgaaccaacatgtaagcagggaagactattggtttaaaagaagattcaatggtgctgaagtttccagtggcaagctttctggtagcttttatggcaatctcttcaagcaagttgtcaccactggcaaactctccagtgacttttatggcaatttcttttagcaagttgtcactgccagtgaactttttgccaaacttccagaatttttttctgacaatatttcacgcaagcttcaactctgttacttttccagcaacttctggcaaacttttgactatcttttttgacatccttcaagttccgttgaacttcttcagagaagttattccccattacctcttatgtgatctctttcataatttctcagtttgtgtcaatctccaactgcctccccattttatgtgttgtgtcaactccagatgtgtggacatgtgtctggtgtatttgatcttatttctacatttgttatcgaattctctgattctgtttggttcctgtcggctgcatttttccatttatactaagatctgatatgttatctctttgcaagatttgatgtgtttttagttctttgtaagttagttatccagctgtccttgacagctggcacataactaactagaagcttgctgtgaaagtcttagaatcttcctctagaagtttgtgtaacttgctctgcaagtctcacagctctatataaactacagtgtaactgaaaacagttgggaataatatcagaattcataaatctcacaaattctctctctctctctctctctctctctcgctttctttctctttttgattatccttttctaatttggtatccagagccaaaaagatccttcgatggcagaatctcctcctcctccttctgctactcctttctcttcatcgtcagcgttctcgcacttgatttctgagaagctcactgatttgaacttcttgctgtgaaagcaacaagtagaaccagtgatcaaagcgcatcaactacaccgttacttggtgtgtacgattcctcttcggtatgcaaatgaagctgatcagaactttggcactgtgaatccggtgtacactgcgtgggaaatacaagaccagatgctcctgacatggctacaatcaattctctccagctcgattctatcgtgtattctaggatctgttcactcctttcaagtctgggaaaagattcatgatcactttcagaagctaactcaagcaagagctcattaacttcatgtcctacaactaatagtacttggttcccagattcaggagcctcgtatcatgtaacagctgatcagaacaatatttgccaacttggctcttttgaaggtccagactaaatttacattggtaatggacaaggtttgcacatttcatcctctggttcatcttcctttcaatcacctattaagtcaaatgtctctttgtctctacacaatttacttcatgttccttgtatcaccaaaaatctgatcagtgtcagtcgttttgccaaggataattcagttttctttgagtttcattctgacttctgtcttgtgaaatctcaggcaactaaagaggttcttctttgaggcacagtgggtcctgatggcttatactagtttccaagcctccacttgcagcctcagtccaagctgttttttccagcacattgtttagtctctaattctagtttacaaacaccagttgtaactaattctagttcacaaacttcatgtgtaaccactgctgtttctcctagctctaaatttgtggcatgtttgcttaggacatccaaatgatcacaccctcaaacttgtattgaacaattgtaatatacctgcatcaaataaagaggctactttcttttgttctgcttgtgctattggcaaatctcacggattgcatgctccctcgtctaacgccacgtataataagcctttggaacttgtttacagcgatttgtggggaccttcccctatgatttcctttggtggcgttcactattacttgtactttgttgatgcccactcaaggtttacttggatatatcccttaacgtctaaagctgacactttcaccttcaaacagtttaaaaccgtggttgagctgcaatataatcaccctcttaaagccttgcaaactgattttggggggggggggggggagttcagacctatcaacaaatttctcacagatttaggggttattcaccaacttgcttgtcctcacactcatcaccaaaatggtgtagtggagaggatcgcattgtggagttaggtcttgcacttcttagtcatgcgtctatgcctctaaagttttgggatcatgcctttatcacagctgttcatcttataaatagactacccactgcctctttgcggttttctgttccttacattcttaactggtcaaaatcccacatatcagcaccttaaagcttttgggtgtgcctcttttccttttctcaggccctatcattctcacaaactggattttaggtcttattagtgtctttttctaggatactctacaaaccataaaggctataagtgcctgtctcctactggcaaaatattcatctccaaggatgtggtgttcaatgaaaccaggtttccatatactgatctgttttctaaatccatatcctcctctaccccaacatccttgtcctcctttttagcaaacattccccttgttggtcctccacttgtcactcccttaccaaacactgtacccaactccccttcccctcctcctcaaacttcccaaactcatgttcttgattctggttctgacattcagtcagttcccacttctcctattcctcaaaattcccaaactcctgttcttgattctggttctgacactcagtcagttcccacttactcttctcctattgattcctcttccactgccactgtgtctagtccaacttcctctgagtcagcctcccaatatcccattcctcagaattctcaccccatgcaaacaagagccaagtctggaattgtgcaaacttgtctacatccgtctttatttctctcacacactgagcccaagtctgccaaacatgcccttcaagatccaaactggcagagtgctatgcaagctgagtttgatgctttagttagtaacaagacatgtaccctggttcctcttcctggtcgtcaagccataggctgtaaatggatatttcggatcaaggagaatcctgatggctccattaacaggtacaaagccaggttggtggctataggctttcatcaagtacaggggtatgacttcaatgaaaccttttctccagtggtcaaacctactaccattcgtctgattctcaccttggcactcagtcatcactggaaactacattagctggatgtttacaatgccttcctcattgggctccttcaagaaaccatctacatgcaacagcctcctggcttttactcccaagataaatctcttgtttgcaaactggacaaggcactttatgggctcaaacaggcccccaggtaatgtttgaaaggcttcaaagcaccttactgcaatatggttttcacaccagtaaatgtgacccctctctatttatctacaaaaaggacagaaatttggtgtatcttttggtgtatgttgatgatatcatcataactggccgctccaattatctcatccagtctctggttcatcacctaaattccaacttttctctaaagcaacttggtcaactagattactttcttggcattgaagttcaccatacacctactggttctgtgttactcactcaaagcaaatacatttgtgatctactgcacaaaactgacatggctgaggcaaaacccatttcttctcctatggtgactaacttgaggctctctaaaaatggtgatgatcttctctcagatcccactatgtacaggtcagtggtgggggcccttcaatatcccactatcaccagacctgaaattagctttgctgcaaacaaagtctgtcagttcatgtccaagcccttggaatctcactggactgtggtaaagcaaatcctcagatatctgaaaggtactctgcactttggattcagatttggaccagcctctcttcctcagcttctcagtctgcaggcttactgcgatgctgactgggcagctgaccctgatgaccgaagatccacctcaggtgcagccatcttcttaggtccaaatctgatctcctggtggtcacgaaaacaacaagtggtagcttgctctagcaccaaggcagagtacaaaagtttagctcagacttaagctgacattctgtggcttcaaaccttacttcaagaacttggcatgccctcttccaaacctctctctctgtgataatcaaagagctgttgcactagcacataatcctgttcttcatgcccggaccaaacatatggagattgatctcttttttgtcagagagaaggttctcagcaacaagcttgctgtagttcacatacctgctcaggatcagtgggcggatcttctcacaaagcccccctcatccaccagatttcagtttatcagggacaaactcaaggtgtttgagctctctgaagctcacccaccttaagtttgggggggggggggggggggttatgtgagtattgtactattgtactcggttcagaatatgtaagttagttatccagctgtccttgacagctggcacataaccaactagaagctttctgtgcaagccttagaatcttcctatagaagtttgtcacttgctctgccagtctcacagctctatataaactacaaagtaactgaaaacagttgggaataatatcagaattcataaatctcacaaattctctctttctttctcttttcgattatccttttctaattttccctatttataggaaacctcttgcatagagtttctatatatatgaaagggtcaagagactctctttcctaagcaaattttcagtccattatttgttccttcattcttgtctccgtttcaagtaggagtttctactgctttacaccttaacccattatccatttgtctagaacatatttttctggtttatgaatatagctcctttaaatctagcaaattatttcctcaaaatgttccagtggatccaaatccttagtttcaaatagacctcctagcttcttcttaagggctgtaagttcagcttcataataatccattaatatatgaacattcacatagactattggtgctgcaattttcccattggctgagagtttaaagaaattggactggccacatgcatatgcattcagggaggagattttagtggtgctattgccagtatgagggtgtgatgaatctggatgttctttcttcctattggttctgattctcttctctcgtagtttcctactattcctttccctatttgatgggcacggtaattgtgctagttcatttcagcaatacaaatgattaattcaagttgtaatttccattccagtaattctattgttattatattcggttgctctgagatttcaatacgactcattccatttctgaaaaacagttcagtttcaagtaatcttacagctagattatataaattgattgctcctatgtgacatgttggtttatgggctagtaccagctgctcttggctttctggttactattttgggtctatttatatctacttgtgtgtgtgtgtgtgtgtccaatatttctgaaactgttgttgtattttgtccagctaaaatttgagaaatgctaatgaaaataggattttgaagtattttgttttctgttactgattagacatgctcagattgatttgttcatattcactactgttaaaaattttaggagctggtgctaaacgatacatgattagagaatagttatattgcagataagttcaactacttggctcattttagattctacttttacagttgatagtggtttggatttaggaactctgtacgttcattttgaaatatatattaatctaatcaaattctgtgcttgagtgttgcagtggtatgcctgagtgtaaacttggattaaatgatagagtattattagaggcacaaggtagaacaaccaagggaaaatcaattgacttggaagacatcaaatttcatcagtatgtatgcttgattctcttccttgtattcactgattgataattatttgtgcaaatttaaatatatactttctacaaatttaaatttatgcttgattcttgactaattctcaaattatgtgctggaacttgacaaaggtgtgtgcgtttggcccgatttgagaatgatcgaacgatttcatttatccctcctgatggatcatttgatttaatgacatataggctcagtacacaggtacatcttctctgtatatgaaatatatttgtttgagtggtgacataataattacataattacactcatactaaaaaataactattccatgtctgtcgattctttgatctttgtttccaggttaagcctttagtttgggtggaagcacaagttgaaaaacattcaaaaagccggatcgagattatggtaaaagctaggagtcaatttaaggaacgcaggtgctgatatttttccttttcccctttaaatctgttcctgggagagaactgcttaccttaaatttatgtactgactagtggtctgctttaaattttagaccactctatatgtatttacttctccaaactactcaagagaatttattttacagtactgccacaaatgttgagattgagttgcctgttcctgctgatgcaaccaatccaaatgttcggacttcaatgggatctgcatcatatgcacctgaaaaagatgcattaatctggaaaataagatcatttcctggaggaaaggtattaattcactaggaaagtgcattgtacaccgatattgatgctatagtttgattgattgatggatttggttgtcttatttgatacttcaggagtacatgttaagggcagagtttcatcttcccagtatagtagatgaggaagcaactcctgagagaaaagctcctatacgtgtaaaatttgagataccatattttactgtgtctgggatacaggtattgctacatatacaatatttttcttatattctgaatattgttatgcctctatgcatcgctatctgattaaaagatgaatatttccagtattatatatctcctatcctgaagcaaagactctaatactgtaccagatacaacaaggacatggataattcaacacggctaatataaaaaatataggatactagaacacctctctatatataggagagacaaaaaaaactaaaatgaaatgaatatgaacataacatatgatcttattaataatcaatattttcatatcatcaagttcatctttttcctatgctagtgagcatcaccaataaatattaagaagaattgttttacaataaagtacttggtttctttacaaaaaattccaacaaatgaatatatatttttttataacactagagtgcatgttcattcatatttcataggggtatggcacaagtgttcaagctgacaatagacttttttttaattgaacacttaatgaggaatgtctgacctgtataagacaggtgtcagtgtcagaagcatgttcaacactgtaacacttcaaacaagagaggtgtctttacttgcttgttgccttggtgtctcacttgtcagttttattatttattgaggcatgaagtaattagtgaactcgatgaatcttttgaaattcatttgttttcatgggcgaattgatattcagttcacaaagagtgtttatagatattaaattgtaaaataattactaattactaatgagaagaaagaacttgacatcataaatggatgagaaactaatatacataattttataacttttctatggttaatagttttgtgtagtagtaatatgaattgcgtgactaggtaatctgaatgaaacatcaacatccacatgatataatgttgaaattattgttaagtttaccatatactgtgatgttttagttcagttaaatgaggtttttattaattaatcaaggtgctaatcaaccatgtaaatgtttttgatttgtaggtaagatatttgaagattattgagaaaagtggttatcaggctcttccatgggtgagatacataacaatggctggagagtatgaactgaggctcatttgagatttgtgtctttgtttggtattcacaaaataattgtctcatttaacgatcgtggatggaagagggagtctttaatcgatttttggctgaccgcatcaaattataagttactcattgtctagaaagttgtcagctaaatctaagctagaaactcttgcaagtccctttggtcaaatctgttttgataggaaaaatgattggttcttcctcttcattctcaggccttttttgtaatcacaatctgtccatctttttctatcgtcttcaaattgtagtctgatcttcattttacagagaattctagggttttgtataattggtcaaattgtagtctgaccaattatagatagggaaataattgtccctcaaccatgtatgcacgataaaatatacatgtatttttcaaatatctattcacagttttacagatatattgcagaaaagcgcggttgtgttc

SEQ ID NO: 23 - DNA, 7983 bp, Helianthus annuus
  source 1..7983: mol_type = genomic DNA
accaaaactcctcaaaccttcacttccattttcaacacaaaaaactaccgatcatcgcatctccaaatcatcttcaatttcacaaatctcactccacaacgaactaaaatctcatcgagctacacgcagattcatcgattgatcgatcagaaatcagatctgaaatctcaaacaaattcagcaaccgtacggatctgatccgtcgatggcaggggcggcctctgcgctgttccttctcgacatcaaaggccgtgttctggtgtggcgcgactaccgaggcgatgtttctgcagtgcaggctgagcggttcttcactaaactcatagagaaagaggttgatttgatttgtgtgttttgatttgattaaaattaaattatgaatttgtttgtttagcttctaatttgtagtgcaggcgtgttataaggtgagttgttagtatcgttagtttgaattatgcttgtttagtaggtttaggaattagatcgagcacttgctgatctaattggaaacgtaaaagtgtatactattgtttgactgtatgtttctgcatttatttgtttataatagattctgaatttgtttattaagctcctaatatgtatagcaggtttacgttaaactgagttgttagtattgttagtttgaaatatactttgtttagtaggtttaggaattggattgagaacatgtaaatctgatagaaaacttagaagcttgtactatctgtttgattgtatgtttctgcattttttctagtatactatattttgaatttatttactattgtcgtaagtgttttaaacctagaagtggatctatatgaagttcctgatttgtatagttatagcaggtatgttgaagtgagttgttcgcattgttaatttgaattatgcctgtttagtaggtttaggaattagatcggaaacatgttgatctagtagaaaacctagaagtttgtactctctgtttgattgtgcgtttctgcattttttgtatatattaaaatatagtaacaattaaaggcatagattctgaattcgtttatcatcgtaattcgtaagtgttttaaacctagaagtgaatcaatattaagctcctgatttatatagttatagcaggtatggtaaattaagttgttcgcgttgttaattcgaattatgcttgtttagtaggtttatgaattcgatcgaaaacaggtaaattaataggatacctagaattttagactatctgttataattataaattataaagtgtggtaacaactgaaccaaaggaatagtgaatgtgaattattgtttcatctggaattctggaccggctaggttaatattgtaaccaagtggccatccatgcttgttgatgttgaatttagtttttattgtttgtatgcatgcaaatgggtgcatctaatctgtttatggtgttttgatgaacctcagggtgatcaagacgctcaagatcctgttgtatatgataatggtgtcacctatatgtttgtacaacacaacaatgtatatctgatgactgcatcgaggcaaaactgtaatgctgctagccttctcctgtttctacatcgtgtagttgatgtaagcactgttggtaactgaatcaattaaccattattttttgttgtttgtaacttaaaaatatatcgtcactttgctcataaactctttaaacttatttttaatgatacttctaattaatacgtgaagcaaaattaagcttctaacattaatcaagttcttgtttgttgttggtgacaggtatttaagcattactttgaggaactagaggaggaatcacttagggacaactttgtggtcgtggtatgcatattttgcgatatattctcaggaaaatgttgattttttttttgaaagcttaaaccctacggacttccattggatttgcatataagtcaccggactttgtttttgcataatttagtctgaacacataaaaaatcaatgtaaagtctctttatataaagtgtagggacttgattacgcaacaaagggcatatttttcgtgtttctataagtctagggatttaatcatgcaggaaacatatatgtcaaaaataaagtcaactttttcatagagtttctgtaagggatttaattatgtaaaaatgatatctaaggacttatgtgcaagttttagcgaaggtacataggctttcttgcggacctatattctcactagatatgtcactatagtgtcactaaatccaggggatgtaatcatgtataaataaaatacaaggacatatatgctcactaaatatgacactataagaggggcaaaacctgaagcattttgatatgttacagtatgaattgcttgatgaaatgatggactttggttaccctcaattcacggaagctaaaattctcagcgagtttatcaagaccgatgcttacaggatggaagttacacagaggcctcctatggctgtcacaaatgcagtgtcttggcgtagtgaagggatacgatacaagaagaatgaggtaggtctttctgtcagagctagataattaggagtatgaaattacaaaaaaaataaaaataaaatctttttgtcttgttcaggtgtttttggatgttgtggagagtgtgaatatactcgtcaacagtaacggtcaaatagttaggtcagaggttgttggggcgctgaagatgagaacttatctgaggtaatatgatttacacttgttcttttgctagatatcgtataccatcctatcactgtccactgaactagttgtagatattctttttatcatgtcttgtctataatgttaagctgtaacctttagacatttaaatgtatataatttctatatgctaatgagcttgttctaggtcttctagtaggagttttgacgtaaagataattcttgcctgattctattgagattagaagataattttgattacctgacttttttgaccatattcttcccacctaaaaaaatactaataataacaactaacaagccttgtcattaatatcaatgagaataagaaatcatagctatacatgaaggaatacttagggagtaataagaaatgtatgttgtatgagagtatattctgaattctactgctcatatgaaagagctgttgaacttaagttttaacaggagatgatacgatacacacgtgtgagcagaatgtgaaccgaatacaaacttgggattttttgaaaattgagtcatgtttgttttgttgatctggatagatttctgcacgccagtactattatgtcactctccaacacggttgcttaaacatgtcgaataatcacataattttgtgcaactactaaatagtgatgtgtcattacttgcagtggtatgcctgagtgtaaacttgggctgaacgatagagtactattggaggcacaaggacgatcttctaagggaaaagctattgacttggatgacatcaagtttcatcagtatgtctttaaacccttcattgttaaataaccctgtgcagttaatgaggtaaaaaatcggatatcggtcgaagaccgatatttgagatataggttatcacggcggaatatcggtaattttaataacattcaggaaatatatatagagagaaagtgtaatgtacaatctggcttaacgtacaatgcgtacgatgtgaggattccgcatgttataaacttttaaacgtccaaaaccataaagccgcatgttgaaaatcgttaatccgcatgcagaaaccaaatccgcatgtttatgaccaattccgcatgttgaacatcaatccgcatgtttgaaccataaatccgcatgacccagtatccgcatgttataaacccaaatccgcatccgcatgttatattttcacatcgtacgttaaggccaattgtacgttaactaacccctatatatatatataaatagagagtgagagagagaaatttaacactaacaattcagtatactctcctattattaataaattaatcttttgcaacttgcaaacactaacaattgtagcaagtaggaactgattaagactttaaccacttacatttaacaatgaagacttcaaacactaatacgaacaataagaagaaagatgaatcatgaatggtagaactaagaagaaaggtactgatatcgggaaaattggtatataccggtcgatatcgccgataatactggtaacaatattctggccgatatttgacaccgatattttacatggggactgataaccgatatatcatagatattaactgcatagattttaaccataacatttgtgaaatcattttatatttaaaaaatggtgttgaaacatataatattaatatattataatcatatttaacagaataacagactatttacataaaaatgataaaaattagggaaattttatgggccaattctggttatatgggtcaaactggtgaaacttaaaaaacatattagaaaaggaaacaggtctaatggggtttaaaatgacccgttaccagcctgcttaattcaccacctctaatttttaaccattttcgcacatttttgttgcgtttatcactatctgctgctagattcagtcaatatgcaattttgatataggtgcgtgcgtttggcccgttttgaaaatgaccggacgatatcttttgtacctcctgatggagcttttgacctcatgacatatcgactaagtactcaggtactttgcagtttcttccatcaccaccaaaaaattaacaataaacatccctttttacctaactatattggattttggtgctttctttcaggtaaagcctctaatatgggtggaagctcaaattgaaaggcattctagaagccgtatggaaataaccgtgaaagcacggagccaatttaaggagcgtaggtattaatgcttccagtgtctaattttctagctgctgtttaaagagttgaaaatgccaactctggtttaatctattgctttgacaatgcaatctttggttaaatctattgcttctttttcatggtattgctttggcaatttcatctcatttacttataaatgggttgatttggctagtgttttatctctcatgcatcaaacggtaaaataaaaaaagtgatccaataaccgacccatttaaagttcgggttagttcgggacaggttgttcggttttttatttagatgtaaatgaaaataaatgtttttttttttacaaaaatatcatcaaaatttatattgctattaaaaatatatcatcaacattcaaacatcatttgacaatataatattataatgttcaaaagtctcaaaacttaggtagtgtgcgtttcacataattgaatggaatcttgatggaattggaattgaacaacataaggaaaggaatctacattccaattccatccaaatttcattccattttgcaaaacaaacacacctaaattacaaatcaaatttcaaatttctgcgcgaattcccattccaattccatcacaatccaggaaacgaacagtaccttaatgttccagatactagagactccaaaccaaaaagcatttataaaaacaataaatgttcagtttttttttcgggtttcgtgtttcgggtttttggccagatataagtgacccgataaccaacccatagaagattcgggttggtcaggttcgggtttttcaggtatctctagtttgggttcgggtgactttgaattcgggtcgggtttcagataaaaatggacagccctactcacttcgcactccattttgctacctctaggattactgtctaaaaaataagaacatttaaatttgactgttttgactttgcagcactgcaacaaatgttgagattgaattacctgtgcctgctgatgcaaccaatccaaatgttaggacttccatgggatcagctgcctatgcaccagaaagcgatgcccttagctggaaaataaaatcatttccaggtggcaaggtaaaccttatatatatgatatggtgttcatctacacttaccaatttcatgtgttgaccaagtcaaagttaaaaattctgttggatattttaggaatacatgttgagagcagagttcaaacttcctagtataacagcggaagaagcagccccggagagaaaagctcctattcgtgtgaagtttgagataccatattttacagtttcaggaatacaggtaacccttctcagtttctccttttgcattttgggtcatgttttttttttttttttgaagtaacaagtcaagtttagtgagttaaattttaatgtagggaaaactacatgaaatagaaatgaacttccaccttttttagattgagtaaaatggcattttcgtccctgaggtttgggcagttttgcaactttcgttcaaaggtttgtttttccgcatctggatcaaaaaggtttaaaatctctccgttttcatccggcttgttaactccatccatttttctccgttaagccaggggtatttccgtcgtttttgttaacttaaagagcaactcggtctttttcacttaaagggcaatacttgtactatatgctaaatgcttgtacataaagtgaaagaaaccgagttgccctttaagttaacgaaaatacccctgacttaacagagaaaaatagatggagttaacgagctagatgaaaatggcaagatttcaaaccttttggatctagatgcgaaaaaacaaacatttggacggaagttgcaaaacttgtcaaacctcagggacgaaaatggcattttactcgttttagaagctagctttaaactaggcactgccatgcaaatagaaacaaacttccgatttgttactgattttagcaatatctaaaagttacaagttcgaaacattgattttttctataataatatgtctaaaagttagaaaatgtcaaatcaaataccgtgtggcatataatacactaaaatgagtcatgacgcaatatcttatgccataactctttgaaaaataacatttaagtgtaagtgaccagctacaccactatcagtaatctttccacaccacagttttctctcattctagtattccacacacgcttaacacatttttttccgcacgttttagtgttatttacataaatcatttttttctttctagttctcagataagttgtaagacatagggttcataatcaacacaactcgacttgaaataaatccttgctactcgtatagttttgctgatttttttttttacttttatagtatattacaaagaaaaaaatgaaacacaaatcgtcattttagctctataagtagggtccataatcaacatgactcgccttgattaagctaatatacattcttttggattttacaggtccgttaccttaaaatcattgagaaaagcggttaccaggctcttccatgggtgcgatatataacaatggcaggcgaatatgaactaaggctcatgtgaaaccttattccaagcaagtgttttgtatttaaatacatttacaatttaaatgagttgttcgtcaagcaaaaattttactctcatgcaccggtttttgtatttgttgtgcacaatcatcagtaatctttactacgattgaatataacacaattcttcatgttttaggttagaggtgatggatgaataagttgagtgattgagtaaacgtgtttgggctagttcgccatccatttagtgttacgaggggtccataagatgtagacataaacgtcttgatgggtggatgttgtgacaaacagccatccgactttcggaagaaaattcgtttgtttagctcttggacaccttttagttggttttcttcagttttagtattgttttgatttcattttcttgtaaaaacacactatttttgtttgatttcatttctctttgtaaaaacacagtatttttatttgatttcattttcattgtaaaaacacgtgaaccatggattttattaaaacgtatttttatta

SEQ ID NO: 24 - DNA, 1389 bp, Humulus lupulus
  source 1..1389: mol_type = genomic DNA
atggctggagctgtctcggcgctcttccttctcgacattaaaggccgtgttttgatctgccgtgactaccgcggcgatgtctcagccgttcaggctgagcgcttcttctccaagctcatcgagaaagagggagacccacagtctcaggatccggtagtctacgataatggcattacatacatgtttattcaacacaacaatgtttatttaatggctgcttcacggcagaactgcaatgctgctagcattctgctctttcttcaccgcgtcgttgatgtctttaagcattattttgaagagttggaagaggaatcacttagggataactttgtggttgtgtatgagttgcttgatgaaattatggactttggttaccctcagtacactgaagcaaagattcttagtgaatttatcaagacggatgcttatagaatggaagttaatcaaagacctccaatggctgtcacaaatgccgtgtcttggcgcagtgaaggaatacaatacaagaaaaatgaagttttcttggatgtggtggagagtgttaatatccttgtaaacagcaacggacaaatagttaggtctgatgttgttggggcattgaagatgagaacgtatttgagtggtatgccagaatgcaagcttggccttaacgatcgagtgttgctagaggcacaaggcagagcaacaaagggaaaggccattgatttggaagacatcaaatttcatcagtgcgtgcgtttggctcggtttgaaaatgaccggacaatatcctttataccacctgatggtgcttttgatctcatgacctatagacttaatactcaggtaaagccctcgatatgggtggaagctcaagttgaaaggcattcaaagagtcgtgttgagatgacagttaaagctaggagccagttcaaggagcgtagcactgctactaacgttgagatagagctgcctgtgccttatgatgctacaaatccagatgttcggacatcaatggggtccgcagcatacgcacctgaaagtgacgcattggtttggaaaataaaatcttttcctggtggcaaggagtacatgttgagagcagagtttcgtcttccaaccataacagcagaagaaggtgctcctgagagaaaggctcctatacgcgtcaagtttgagattccatattttacagtttctggaattcaggttcgctatttgaagatcattgaaaaaagtggataccaagctcttccatgggttcgctatctaaagatcatcgaaaaaagtggataccaggctcttccatgggttcgctatttgaagatcattgaaaaaagtggataccaagctcttccatgggtgagatacataacaatggctggcgagtacgaacttcgattaatataa

SEQ ID NO: 25 - DNA, 2918 bp, Lactuca sativa
  source 1..2918: mol_type = genomic DNA
ccttaaatttcatttaaacacaaattcatacggatcgcacctcgaaatcgtctctagaatctgattcagttctctcggaatgttatagacaagtaatggctcattgattcttagaaaaattcatttcatttggcagcagatcgatcagaaagtagatcttaaatcgaaaccaataccatacatcaatacggatctgatctatcggttttgagtaattgatggcaggggcggcctctgcgctgttccttctcgacatcaaaggccgtgttcttgtatggcgtgactaccgtggcgatgtctccgcagttcaggccgagcgtttcttttgtaaactgatagaaaaagaggtttttccgttacctcaattcacatgctgtcttttatttgattctctattcgtttagcatcacaagcgtttatgcaaaaagtgaagcaatatacttgtatgttgttcacattgttaattaagatcatgttttagcaggttttttggataaacatcgttttatctagcagctgatagatgcaaaacatataaatcttctaaaaacccacaacttaattgaattcttcttcatctcgtttaatatatagtgtaggaaaatttaaaggaatagcgtttcagctggattggttagtttagaattgaaattaaacccagatcataacgaagaagaagaattcttattttattcggatcgaattggataagtcttgcttgaagcactgttgcacacctattgttgttgtgtatgcaagcaaattagcatgactaattagtttatggtgtattgactaactccagggtgaaccagatgctcaagatcctgttgtgtatgataatggcgtcacctatatgttcgtacaacacaacaatgtatatctaatgactgcatccaggcagaactgtaatgcagctagccttctcctctttctacaccgtgtagttgatgtaagcaccattcagtaatcactaatgaaataaaatagctttcatttctttcactataattcaagaaagacatagttaatgttaatatccttacaagacatgaaagtttatgtatgaagttgtttatttgtgttggctacaggtatttaagcattactttgaggagctagaggaggaatcacttagagataactttgttgttgtggtatgcatattttactacaatatctgatctcaccaaatattataagaaggaaaagtgaatgatttttgtactttgtagtatgagttgcttgatgaaatgatggactttggttaccctcaatacactgaagctaaaattctgagtgagtttatcaagacagatgcttacaggatggaagtttcacagaggcctccaatggctgtgacaaatgctgtctcctggcgtagtgaagggatacgatacaaaaagaatgaggtaggtgttgttcttgttcttgtgagggcagatatgtaattatcttagaataaaacctgattgccttttttcaggtgtttttggatgttgtggagagtgtgaatatacttgtcaacagcaatggtcaaatagtaaggtcagaggttgttggggcattgaagatgcgaacttatttgaggtataacttgattgtggtcttttgctacttcttgaggttgagggtatattttgtaattaagttaaacaatgagggttgatttgttgcagtggtatgccagagtgtaagcttggtttgaatgatagagtattattggaggcacaaggaagatccacaaaaggaaaagctatcgacttggatgacatcaagtttcatcagtatgttatgttctcagttcttcaacctttcttgatttcttcctatattttcttcaattatatgtttatttatttaatatatatatatatatatattttttaatgtttaataggtgtgttcggttggctcgttttgaaaatgatcgcacaatttcatttgtgccccctgatggagcttttgacctcatgacatatcgactcagtactcaggttcttacactttatatataaatataaattgctttttatttatataaattgaataaaactaatatttgatttgatttgacaggtaaagcctctgatatgggtggaagctcaaatcgaaaggcattcaagaagtcgtatggaaataacaatcaaagcccgcagccagtttaaggagaggaggtattatttgttattattattattattatatacttatagttatgacttcaaaaaaaaaaaaaaaagtgtagttatggatggtttgaccagtagtgttgttgactttgcagcactgcaacaaatgttgaaattgaatttccagtgcctgcggatgccactaatccaaatgtacggacatccatgggatcagctgcatatgcaccagaaaacgatgccctttgctggaaaattaaatcatttccaggtggcaaggtatttttctctctctttttcataatatcttcacaaattcaagataatgttgtagttatagattttttgatttttttaattttaggaatacatgttgagagcggaattcagacttccaagtataacagctgaagaagcagtccctgagagaaaagctcccattcgtgtgaagtttgagataccatatttcacagtttcaggaatacaggtgacacctcatcacttcccccttttcatttagatatctcatttttcattattgtttgtttttactttttattataggtgcgttatctaaagatcattgagaaaagtggatatcaggctcttccatgggtgagatatataacaatggcgggagaatatgaactaagacttgtgtgaaaaaagctcttattattattattatttcaacaaactgtttttgtatttaagtcccaattattatcttcggatattattataatatcatttgtttgttgaacgaaa

SEQ ID NO: 26 - DNA, 7738 bp, Nicotiana tabacum
  source 1..7738: mol_type = genomic DNA
ctagcagcccatgacaacaacttgatcggaagtcgatttcgatctcaaaacccatccttcacccaacgcatgaaaattttcattttacaacaatggatcagtggagctaataattgtccgttttaactcttaacaccagtagatcttcaccgggaaaaggttatctccagacagcttttccgttccgatccgtcgatattgatcggaatcaatcattagtagtagagtcacatggcaggggcggcctctgcgctgttcctcctcgatatcaaaggccgggttctcgtctggcgtgactaccgcggcgacgtctcatccgttcaagccgaacgcttcttcaccaagctcattgaaaaagaggtaacatttctgttcaagatttcataattgatgcgtttgaaattggagttaaatttgacttcaggggagtgaaaattgatagtttgatttgaaattatgcaattaagtttaatagattagagaaggagttagaatttcttttgatgatttcacttctttcaagtttagagcttcaaatcttaagcaattttttgcaagcataggttcaaggacttatattgattcataattattgttgaattgtttttgacttataattggagcttgagaagtttaatgtttgctgtgcaatttgatgattatgtgatttgatccattgcagggtgatcctcaggatcctgttgcatatgataatggcgtgacctacatgtttatacagcataacaatgtgtatctcatgactgcatcgagacagaactgtaatgcggctagtctccttctgtttctacaccgtgttgtagatgtaagttctaatgtagatatttgaggatgtgtcctctgactgtgttaatccgaagtcaagtactccctcagttacaaaagaacggcggactttgaagtagggtcaacccattcaattttcggtctctatttggacatcaattcctttaaattttaaagtaaaatttacatattatgaactactcctatataaaatatggtgtacatcagagtattttatagttaaaaatattcttgaagtggacgaaatattttgtttgactcctcaaaatagtaacagtaccgtgtagaatggaacagagggggtaattgttttcttagttggaacttgggaagagttatcattttttattttacctttttggcaggtattcaagcattactttgaagagttagaagaggaatcccttcgcgataattttgttgttgtggtatggggaaatttcatgtgtctttaagatcaaaagttcgagaggaaattatcatcatgttggttaattttgactgagctgatgtttcttgccttttgcagtatgagctacttgacgaaatgatggactttggttatcctcaatacactgaagcaaagattctcagtgagtttatcaaaactgatgcatataggatggaggttacacagaggcctccaatggcagttacaaatgctgtgtcctggcggagtgaagggatacgctataagaaaaatgaagtaggtttacatgtttatttaagaggaattccttttcttcaattggctacatggaagtttgttgttctttcaggtatttttggatgtcgtagagagtgttaatatacttgtaaacagcaatgggcaaatagtgaggtcagacgttgttggtgcactgaagatgaggacatacttgaggttaggatattcttcccatttttactgaacctactatctggctcatgcctcataagaaaaaaattaataaatttttttttttttttacttttcctcctatccctttagttaagttaagataccaagaaatccaactgcatgaatttacattctttagttagcgtgagatagtatatcagaaacataattcactagatttttgagtcatgcattgcacgttcctacctctacaggtaatctgacatttcaatgtatgagtcatagtgttcattaggtggtaaatgttaaaattatgtatataggtgataaatcagtttgacttttacctcattttgtgctagtaatgtaaagaataaagtttaattcacaaccttgttccttcttttcactgaatgtagctataaagtgatcaagtctttatacatctcacccaggaaatttccgtcaccaatagaattgcttgctatacaagctaatttgaccatcataatctgcaagcgctcaattataagttagaattgctaaaatcttcccggcaaagttaggcattgttaatgtttcattgcatactcatttctaggtgcatgttggattttaatatgacctcctgggattgggtcttctttgttctaatcttacaactatgtaagattagagtagcctaggggacgggcactaagtagaagttctgaggaccctctacttagttcgagagctttaattgtcacagaggtgtagatggaggttaggggtgtcaagtttataccatgaaagattaaccggaaaagggccaaatatacccttgtactatgagaaaaggtttaaatatgtccctcgttatgcttttagtccaaatatacccctgctgttatactattagtttaaatatacccttcatccgttaaggttgtccaaggtgaacattcaattatatatgacactagcatttgatgaggtggatgtcacgtggcatgccacctcagcgcccccaacccattttacccctcctctcgatttgttcttccaccactaaaatttcctcccccaccacctagaaaaatagtcaatgctacatgagtttttgccgctggcttctcataactccgatactcctgatgttgcaaacacacactattgaattgtcgtttttgatactatacacttatgttatcgaatcaagaaaaaaatcacaggtaacatttaacataagcttgaggtcaagcgggttcatttatttgtacacataaaatgcttcattttttagcttaaattctatgcattgacaaattaaaaatatttatactatcacaacacttaaacataattgcgggtaactttataaatctcttctatcatcttagtcttatcttacgttacaaggaggcttagagtgtatattgctcgacagaaaaatgatgatgaagatgtggaggatgaattttactctttggttatagttgctgggaccctatcagatggattgaaggggcttttcactaggggtgtacatgagtcatttttggttcgggttttattagtggaagaacaaatagagaggagtaaaatgggttaggggcactgaggtggcatgccacgtgacatccacctcatcaaatatcaatgccacgtaggattggatgtccactttggacaaccttaacggaggaggggtatatttgaatcaatagtataaaggcaggggtatatttgaaacaagagtataactagggatatatttaaaccttttctcatagtacatgggtatatttgacccttctccgaagaataacccattcaacccacctagacttgagcggactaggcaggatatttgcttattggtggttattttgggcacaacccaaactaaccattctaaaatctttgaccaatttcggttgcatatggatcccaaattgatttataagaaaatttatcgaaacatagaaaaatgagtttttcgattttggtacgttgcgttctttgaactttgaagtagtcatgctaaataaagaaaaaacttttattaattcgagttggtaattaaacaaattgtagaataacaaacaaacaatgagaaaagcctttgagttggcgggttgggttgtgacccattgtttagcccaaattggcacgcctattttgacaggttaaacccaacccatttattgattcaacttattttaacccgtcaatattagcccaacccacccatttgacacccctgatcaagtttacaaggccgaataaaattatacggattaatgaatattcagagacacacccatagcagcaatcaaccggtgttgcacttgcaatcatacctcctctccacccgaagatatctatggggcacatgtcctaataagcatacaaatccagcgcttaacttcttgattggtgggttgcaccatgtaagggctagttttgatactcctagttaaactttcaagtactcaagtgaaagttgaaattagttccctcttctaatttgttttttttacttacccctccccgggagctccccactttgctcccttggtgactcaaacccgcaacctcaagattggaggtggatgggtgcttaccacttgcgcaattgtctcttgtccttattccaatttgtttacttaacctttttagaagctaatacaaggccttcaatctctaagggtattttctatcaccttcaaagatgttccaaactgagtatgattcgtcccaattgtaatcatatctgaatgcaagtcccttctccaaccttttgatttaatatatgtggtctagttgttggactgagttgttctttgcccttcccttgatttctttcagttttcagtgatctagtgagctttttattctgcatcggttgtaggctagtagtgtcactaccttatctcctatttgaatgtcaacttctttaggtaaagttgaatgtctgggatttttcctatgttgatacaaaaagcacttagttccactacttgaaagtcatgctcctcagtctcgttgagtttgacttgttggttttatcttactgtatatagagcgactgttatctggaatgtaagccttactgtttctttcttgcagtggtatgcctgagtgtaagcttggtcttaatgatagaatgttgctggaagcacaaggacgaactacgaaggggaaggccattgatctagatgatatcaagtttcatcagtatgaaattgttcagttatttctttttgtggtgttatgatttactggtctctcctgtcaaacggaattgtatggattggtaattgatttacttgtatatcgggcttttcgaaaataatggggcatgggaggtcgggaaaaggaattaagtagttaagtagtaaaaggtccctttttttgggaggaggtccgcctacggtttttgaaccagcaaacctagacctcccatacaattagtcaaatgaatttgatcgaatatcctgaccagtttctgatagtaacatatgttgctcggactctctaaaatatgccgcacccgtgtcggatccttcaaaaatgcattacttttggaggatccgacagtcactccgggcagcatttttgaaaagtgttaacattgatagtaacccatttttctctcttattgcccttctctttctattctactaattttgcttgtaatataggtgtgttcgcttggcccgatttgaaaacgatcgcactatatcattcatacctccagatggagcttttgatcttatgacatacagactcggtactcaggtaaatcatgagcttactgcatctctaaaacttttagtttacttgtggaagtccttaagcaaaatagtttaaacccttggtggtacttgttctcaggttaagcctctcatatgggtagaagctcaagtggaaagacattctaggagccgtatggaaattgtggttaaagcacggagccaattcaaggaacgaaggtatgtgtatcaagtatacatgtgaaatattcaactgattagatgcatcatttactctgtactatggatggcatgcaatatattataacaaagctttccatgtctagttatgagtttcttcaataatttcagtactgcaaccaatgttgaaattgagttacccgtggcaacggatgctacaaatccaaatgtccgaacatcaatggggtcatctacttatgcacctgagaaagatgcattgatttggaaaataaaatcttttccaggtggtaaggttagtatagacttgatcatagttgaagattaactcatagttttacttttctctttgttctctcgttgggcttgcctatacgtactttcatttctttttcaggaatatatgttgagagcagagtttactcttcccagtattacagcagaagaatcagctcctgagagaaaagctcccatacgtgtgaagtttgaaataccttattttacagtttctggcatacaggtaagcccttaaaggcattagttgtacttaagtttcagaaagcccttaaaagcattggctgtacataagtcgtagacttccaggtcttttttctccttcatctctgtaatctctaggcccatgctgataaccttgcttagtctatcatattgagccaccactattagtctcggatagagctgttaactctacatacattaggatttagaactggcaattactttaggggttgacacttcaaatggtattcggaattagggcttattgtacatgataaccttgcttagtctataatattgagccaccactattagtctcggatagagctgttaactctacatacattaggatttagaactggcaattactttaggggttgacacttcaaatggtattcggaattagggcttattgtacatgtcaaggcatataggagacaatgaggtgatgcggatggttgagttctgctgtagaggcacattggaagaaatttaaaagaactgccaaaacataaaacaaacctgtccatttaattattatccttcaagttattttcctcgctagtggctactgttggtgcttgacaaactgcaataagaaaagagaggcagggcgagggttctgtgctggatgatggggcgatggatagctgattgtaatctcttcatgtacagtaactgcatatactacagtctaattacctatgggtgtggtctgtttttccggtacaggtataggctgtaatactgcaattcaccacctaaataataatgatttaagtggagacaagtttataagatatggttccgacagtactgactaatatgtggattccaattaagcacttagtgttccccatatgccttcctagagaaccggaagtaacaatctccagtgatcgaactttttaagatctaatctggctctgctgtgtgattgaactgtcatccataaaatatcttgccttctatgacttatctcctttgtttagtgtttgaagagtctcttttacatggcaactcaagtatacttttgtttttatctgggctttaatatgatatggtgtgttcttaacattgtaatgacatggattgttcaatgcatgttaggttcgctacttgaagattattgagaaaagtggctatcaggctcttccatgggtgagatatattacgatggctggtgaatacgagttacgactaatataaaaggtcaagctgagatggtgtttccggccaattgagtttgttagcaggcctcaggtaaaccacaagttctaaaattttgagctgcttcgtggaacgcaactgctcattttctgactgggttttaaggaaaattcctgggccagttttgttgttaattgtaattgactctgttatatgtgatggtgttcatttgcttgtagcataaaatgcttatgattagttgcgtatcaaatattttttcaaggcagattcccaacttccaactgcttgtatggccaaatattcattgttttaactttgtttaaagcagcttcgcttcgagcattggataaacaattgatgttaacattgaatttcattttta

SEQ ID NO: 27 - DNA, 5468 bp, Ocimum basilicum
  source 1..5468: mol_type = genomic DNA
ctgaaggattgaattcaacttcaataattctcttcccaattctctctcacacactgtccagcacgaattatgcggtcagtttacccctcgatttccacctagttgcgggatcagcaccggatctcgccgccattgattccatcaactcgtgatctacggatctcgtatgctattgaaccggagaaattgagccagaaatcggctgattcgggccgcacaaatggcgggagcagcatctgcgctgttcctactggacattaagggtagggttctggtgtggcgggactaccgcggagacgtttccgccgtgcaagccgaacgcttcttcaccaagctcatcgagaaagaggtgaggtttctttatttctggtttgtgaatgcattagattggctgtgttggtgagcatgcttttcgattggaatgagtgagagttgattggtgatggattcaagtaagaagaatgagagttctatttggcagattttgagcttgatcttgatctgatcttccgacttataattgatctcgtttgatcattttcgtcttttattgttgaaatgacgtaattttggtttgtgactgggagaatgagtgattttagtagatgcaaatttgatcagttcaaactgaactgggagaaaacatggaatatgggttcattgaagttgaaaattacgtgtaagaaaataaataaagcaattggaatcagttatatttttgtaaattagatgtgattggaatcactgctcctattcaaacagttcgatccatagatacagtgatgaagattgcaatatggaacgtcagttgttttgtagtagttatgagagggctttttttggctagcttgcacgtttcttcaatcagatgtcattttgctgctaaacttgcttcaagacaagttggtttttatgtaatatgtggtaacactactttcgactgcaaatgatcatcacggttgtcgtattctttattttttgtttagttagttttctaaatcaccaatgatcctgcttgctatttctataatttgtacccgaatgaactagacaattaacacatttttaatctataatgatgtagggtgatcctgagacccaggatcctgttgtgtacgacaatggtgtgacatatatgttcatacaacacaacaatgtatatctcatgactgcgacgcggcagaactgcaatgctgctagccttctcttatttttacatagagtagttgatgtaagtactattggctattaatgtcccatttttaatgatatcgtctttaacttattgtactataagtgttaacttctttaatcataatctcgtaacaggtcttcaaacattactttgaagagttagaagaggaatctcttagagataattttgttgtagtggtatgggaacttccttgtcctttatttttgattttatatataaatcacaacctcgatgagagaatctaacaacttatttcttatgtatttagtatgagctgctggatgaaattatggactttggctacccacaatacactgaagcaaaaattcttagtgaattcataaaaactgatgcctacaggatggaagtggcacagaggcctccaatggccgtgacaaatgcagtatcatggcgcagtgaagggatacgctacaaaaagaatgaagtgagtttttcccttatatggcattggatgcatttcttgaacactggattatatgggcttttgttggttttccaggtgtttcttgatgttgtggagtgtgtcaatatactggtcaatagtaatggccaaattattaggtcagatgttgtcggggcactaaagatgcgaacatacttgaggtggctctcactttattttagtatttcctgctcttatacaatcttcagcagtatatgattcaaaccccaagttgtctcttatatccatataattcgtttgagtaagtttcaagggattaagtgcatgctatgtttcatttttgttaatttacgacttatgaattcttatatagatgataattgtatcaaggcatgcatgggcacaagtgattctgatttggaccagaaaaaccattaaccattatattcaaatgtttacatttacctctgtgagtatgtgtgctttaatttattcttaatatcactcgagtgttttttttattgttaactgtatcaaattagttgagggaagctatcttcaaattttgaaatatgattacatgtgtctgcatttgtgaaatttgatgtttctttctgctggaatagtcatcatggtgccttcattgcagtggtatgcccgagtgtaagcttggacttaatgatagagtgttgcttgaggcacaggggcgagcaactaagggcaaagccattgatcttgacgacatcaagtttcatcagtgagtaatttacacatatcattttgcaaaatgtgatatcttttttattgctgaagaacaaaaatataccattgctacccagttaaactactcgtgcacgggtagcatcactgtcatttataaattatatgttaagagaaaaatgttataatgttatatgctataacggaaatgcattctaaatatagatatgagtatatgcagccagtgtatgttgttctctattggtttttcttcatagtccttatgtaatttggcatctggttattgattcaggtgtgtgcgcttggctcggtttgagaatgacagaaccatatccttcatacctcctgatgggtcatttgatcttatgacttacaggctcagcactcaggtttgtttgtcaatactgggtctcacatttattcctctaatgatagttatttgggaacttatccaacttaggatagaatgttccctttaaagcgtgaaacttcacatgcaatcatcaataagaagcttaagtctgtttgcactggaaaatattgagaaaatttaaaaaacaaaaattaatttcttaactcttggattattaaattggttccatagagcatgaaaatattctgatgtagtaacagttacctcttccttgagttaatttattgcttgaagaactcagttaccattttcttacaggtaaagcctctaatttgggtcgaagctcaggtagagaggcactctaggagtcgtatagaaattatggtgaaagccaggagccagttcaaggagcgaaggtatattgcctgcatctgctgtagaaattcatgaattgtttcagtttctatctatctgatcggtattttatggttaaatttttaattttattttgtactcagcactgcaactaatgttgaaattgagttacctgtgccacctgatgccaccaatccaaatgttcgaacttcaatgggatctgcttcttatgctccagaaaacgactcactagtttggaaaataaaatctttccctggtggtaaggtaggaatttttttaggccaatcagattcccctgcctttctgtggtgtttgctttactagcatggccaaattttccatgagtattttttttattgatttgtttgcattcaggaatatatgctgagggcagagtttaggcttcccagtattacatcagaggaagcagctccagaaagaaaggctcctataagggtcaagtttgaaataccatatttcactgtttcaggaatacaggtgagctccaatgggttgtgattaaatatttttattttattagttttgtcatcttgatgctctgttaatgttctgcatagaaaataattattgtgtgatctaattattgtgcaaaaatgctaaattcgtcagccatcataaagagttacaaaatccatgcaatcaattcttgtatgagttgttgcgcgtgaaaatgtcagcttttgagatatttgaaaagcttttgtgagatttgagattcaactgtaagtgttctttttcctggcaatgttaactttagtgttgataaatatacataatattaggagtattaatttgatagttgaacctcatttccttttttctacaagatccaatacacattatatgctaagttatcaaattctatcctgaacaatatgtgaatatgcctatctatccgaactttgatgttgttttcattttctctgagttaaaacctaaccaaattaacgacccgaaagaatcccggcactggttttagaaatttgaagttctaatatgctctagattttatgggttctcttcttcaacttttctattttgggggtttaaattttgtttgaagttcagatccctagtttatgctggaaaagttttaagatgatatatttgattagttctttttaatactttaggaataatgaagacaacgaaattatgtaagttgctaaatagttaagaaaaaaaaagaaaggaaaaaatgcaacaccacggactagaaattgctcctttgcaaagtactagtgaaaggaacgtgtattcacatgcatagagttatttagcatatcttaattgaatttcatatttaattctattgatactactaactgagttaattcaattagtcacatcatggattacaataagatacatgaataacccaatgggtgatattaaattaaataaatataaattatatggttggttagataattacataactatataatggataacatcaaataaaaatatccttaaattaaatatttgtgaagaataatataggcaagacaacatacattttgttagaagataaagacacttttacaataaacatagataacacttaaagaggccctcataatcacaggccacaagcccatagttccactccagctctctaagttaactgcagacctttagcaacttcaaagctagaagacctctgttcaacgggttagacgaacaactgtgtatagcttattttcatttcgcaccatctagtttgttctaagttggtttttacttctgcattgggcttagaagcatataacttaccttgagaccttgctgaatcctcttatctgtgttctaattcgtttttgagaaatttagaaactcatacagtggttgtgaccattgaatctgggggttgtaggtccgctacttgaaaatcattgaaaaaagtggataccaggctctcccatgggtgaggtatataacaatggctggtgaatatgagctcagacttatttgattgaaaatgacatcccgtactcactcggaccaacagccacgccatgtcatgtgtgtctggctttacagcaaatcgttcatcatgtaggtcttcttccatcttattgctgtttgtatcatgggattttgtaatcgttaaatgccacattgttgatttttctatcgcgcgtgcaagtttttgttttattacaaccatgttactccaattctttgtatgacaagggtaacctacaaacgtttcttgagggtgtaaatgatctcttttgtttgtaaaggaggagaatcgttgatgcttatcatttagtattaatttatactttgtt

SEQ ID NO: 28 - DNA, 5555 bp, Ocimum basilicum
  source 1..5555: mol_type = genomic DNA
gaagaagaaacctctttctttcatttttaaaactgaaggattgaattcaacttcaataattctctcacactgtccagcacgaattatgcggtcagtttacccctcgatttccacctagttgcgggatcagcaccggatctcgccgccattgattccatcaactcatgatctacggatctcgtatgctattgaaccggagaaattgagctagaaatcggctgattcgggccgcacaaatggcgggagcagcatctgcgctgttcctactggacattaagggtagggttctggtgtggcgggactaccgcggagacgtttccgccgtgcaagccgaacgcttcttcaccaagctcatcgagaaagaggtgagatttctttttttctggtttgtgaatgcattagattggctgtgttggtgagcatgcttttaaattggaatgagtgagagttgattggtgatggattcaagtaataagaatgagagttctatttggcagattttgagcttgagcttgagcttgatctgattttccgatttataattgatctcgtttgatcattttcgtcttttattgttgaaatgacgtaattttggtttgtgactgggagaatgagtgattttagttagatgcaaatttgatcagttcaaactgaactgggagaaaacatggaatatgggttcattgaagttgaaaaatacgtgtaagaaaagaaacaaagcaattggaatcagttatattttgtaaattagatgtgattggaatcactgctcctattcacagttcgatccatagatacagtgatgaagattgcaatacggaaggtcagctgttttgtaatagttatgagagggctttgcttgcacgtttcttcaacagatgccattttgctgctaaacttgcttcaagacaagttggtttttatgtaatatgtggtaacactactttagactgcaaatgatcatcacggttgccttattcctttttttttttgtttagttagttttctaaatcaccaatgatcctgcttgctatttctataatttgtacccgaatgaactagacaattaacacatttttaatctatactgatgtagggtgatcctgagacccaggatcctgttgtgtacgacaatggtgtgacatatatgttcatacaacacaacaatgtatatctcatgactgcgacgcggcagaactgcaatgctgctagccttctcttatttttacatagagtagttgatgtaagtactattggctattaatgtcccatttttaatgatatcgtctttaacttattgtactataagtgttaacttctttaatcataatcttgtaacaggtcttcaaacattactttgaagagttggaagaggaatctcttagagataattttgttgtagtggtatgggaacttccttgtcctttatttttgattttatatataaaactaaacctcgatgagagaatctaacaacttatttcttatgtatttagtatgagctgctggatgaaattatggactttggctacccacaatacactgaagcaaaaattcttagtgaattcataaaaactgatgcctacaggatggaagtggcacagaggcctccgatggccgtgacaaatgcagtgtcatggcgcagtgaagggatacgctacaaaaagaatgaagtgagtttttcccttatatggcatttgatgcatttcttgaacactggatcatatgggcttttgttggttttccaggtgtttcttgatgttgtggagagtgtcaatatactggtcaatagtaatggccaaattattaggtcagatgttgtcggggcactaaagatgcgaacatacttgaggtagctctcacgttattttagtatttcctgctcttatacaatcttcagcagaatatgattcaaaccccaagttgtctcttatatcatataattcgtatgagtaagtttgaagggattaagtgcatgctatgtttcatttttgttaatttacgacttatgaattcttatatagatgataattgtatcaaggcatgcatgcgcacaagtgattctgatttggaccagaaaaaccatcaaccgttatattcaaatgtttacattcacctctatgcgagtatgtgtgctttaatttattcttaatatcactcgagtgttttttttttttattgttaactgtatcaaattagttgagggaagctatcttcaaattttgaaatatgattacatgtgtctgcatttgtgaaatttgatgtttctttctgctggaatactcatcatggtgccttcattgcagtggtatgcccgagtgtaagcttggacttaatgatagagtgttgcttgaggcacaagggcgagcaactaagggcaaagccattgatcttgacgacatcaagtttcatcagtgagtaatttatacatatcattttgcaaaacgtgatatcattttgattgctgaagaacaaaactataccattgctacccagttaaactactcgtgcacgggtagtatcactgtcatttataaattatatgttaggagaaaaatgttataatgttatatgctataatggaaatgcattctaaatatagatatgagtatatgcagccagtgtatgttgttctctattggtttttcttcatagtccttacgtaatttggcatctggttattgattcaggtgcgtacgcttggctcggtttgagaatgacagaaccatatccttcatacctcctgatgggtcatttgatctaatgacttacaggctcagcactcaggtttgtttgtcaatactgggtctcacatttattcctctaatgatagttatttgggaacttatccaacttaggatagaatgttccctttaaagcgtgaaacttcacatgcaatcatcgatcagaagcataagtctgtttgcactggaaaatattgagaaaatttagaaaacaaaaattaatttcttaactcttggattattaaattggttccatagagtataaaaatattctgatgtagtaatagttacctcttccttgagttaatttattgcttgaagaactcagttaccattttcttacaggtaaagcctctaatttgggtcgaagctcaggtagagaggcactctaggagtcgtatagaaattatggtgaaagccaggacccagttcaaggagcgaaggtatattgcctgcatctgctgtagaaattcatgaattgtttcagtttctatctatctgaccggtattttatggttaaatttttaattttattttgtactcagcactgcaactaatgttgaaattgagttacctgtgccacctgatgccaccaatccaaatgttcgaacttcaatgggatctgcttcttatgctccagaaaacgactcactagtttggaaaataaaatctttccctggtggtaaggtaggaatcttttaggccaatcagattccccttcctttctgtggtgtttgctttactagcatggccaaatttcccatgagtattttgtttattgatttatttgcattcaggaatatatgctgagagcagagtttaggcttcccagtattacatcagaggaagcagctccagaaagaaaggctcctataagggtcaagtttgaaataccatattttactgtttcaggaatacaggtgagctccaatgggttgtgtttaaatatttttagtttattagttttgtcatcttgatgctctgttaatgttctgtatagaaaataattattgtgtgatctaattattgtgcaaaaatactaaattcgtcagccatcataaagagttacaaaatccatgcaatcaattcttgtatgagttgttgcgtgtgaaaatgtcagcttttgagatatttgaaaagcttttgtgagatttgagattcaactgtgagtgttctttttcctggcaatattaactttagtgttgataaatatacataatatcttttttttttttgagaatatacataatattaggagtattaatttgatagttgaacctcatttttccctttttctacaagatccaatacacacattatatgctaagttatcaaattctatcctgaacaatatgcgaacatgcctatctatcccaaactttgatgttgttttcattttctctgagctatttaaaacctaaccaaattaacgacccgaaagaatcccgacactggtttcagaaatttgaagttctaatatgctctagattttatgggttctcttcttcaactttctattttgggggtttaaattttgtttgaagttcagatccctagtttatgctggaaaagttttaagatgatatatttgattagttctttttaatactttaggaataatgaagacaatggttcatagtttgggatagattcgactatttagcctaaattatgtaagttgctaaatagttaagaaaaaaaagaaagaaaaaaatgcaacaccacggctagaaattgctcctttgcaaagtactagtgaaaggaacgtgtattcacatgcatatagttatttagcatatcttaattgaatttcatatttaattcaattgatactattaactgagttaattcaatgagtcacatcatggattacaataagatacatgaataacccaatgggtgatattaaattaaataaatataaattatatggttgttatagataattacataactatataatggataatatcaaataaaaatatccttaaattaaatatttgtgaagaataatataggcaagacaacatacattttgtaagaagataagacactttcacaataaacatagataacacttaaagaggccctcataatcacaggccacaagcccatagttccactccagctctctaagttgactgcagacctttagcgacttcaaagctagaagacctctgtttaacgggttagacaactgtgtatagcttattttcatttcacaccatctagtttgttctaagttggtttttatttctgcattgggcttagaagcatataacttaccttgagaccttgctgaatcctcttatctgtgttctaaagtaattcattcgtttttgagaaatttagaaactcataccgtgcttgtgaccattgaatctgggggttgtaggtccgctacttgaaaatcattgaaaaaagtgggtaccaggctctcccatgggtgaggtatataacaatggctggtgaatatgagctcagacttatttgattgaaaatgacatcccgtactcattcggaccaacagccatgccatgtcatgtgtgtctggctgtacggcaaatcgttcatcatgtaggtcttcttccatcttattgctgtttgtatcatgggattttgtaatcgttaaatgccacattgttgatttttctatcgcgcgtgcaagtgtttttattacaaccatgttactccaattctttttatgacaagggtaacctacaaacgtttcttgagggtgtaaatgatctcttttgtttgtaaaggaggagaatcgttgatgcttatcatttagtattaatttatactttg

SEQ ID NO: 29 - DNA, 10772 bp, Phaseolus vulgaris
  source 1..10772: mol_type = genomic DNA
gtttggagtttcaacccacccccaccttgaatggaatccgacattacattgcagcgatagatagaagaaacaaaatcgaaaggttcaattcctacacgcagtgtgcgaaacccaattactctaccatggtttagcttctgacatggctcgctgaaccctagcgtttctccctctttgcaacgcttgtccgatcccgatccctttctgattccgatctgatccaatccaatgtcaggggcagtctctgctctgttccttctcgacatcaaaggccgcgtcctcatttggcgcgactaccgcggcgatgtcaccgccgtcgaagccgaacgcttcttcaccaaactaattgaaaaagaggttcattccttcttttgaccaatctatgatatgattatttgtttaactcagcaccaagtaacgtatcaattatattctcgtttcagctcctgttttgagaaatttgttctgctgtttctgatgcagtttataatgtttttgtcgaagctaggctagattttatgttaataggagtggaattggaatggagaattttgatttttgtatagtgaagcttgtttttcaaattgttgcagggagatccgcagtctcaagatccggttgtgtatgataatggcgtgacctacttgtttatacagcatagcaatattttcctcatgacggctaccagacaaaactgcaatgctgctagccttcttttcttcctacatcgtattgttgatgtaagtgtgttatttctaattgtggttttgaattgaaggcttggttttgtcatagcgataatgattcataggaatggttcgtgtctttgaggcaggtgtttaagcattattttgaagaattggaagaggaatctcttagggacaactttgttgttgtggtaaaatgctagtgtccctttgaacaccagtttctttaacagctgaattagtctttctgggcaaaatgtttattacggatatgtcctttacagtatgaactgcttgatgaaataatggactttggctacccccaatatactgaggcaaagattcttagtgagtttatcaagacggatgcttataaaatggaagttacacagagacctcccatggctgtgacaaatgctgtatcctggcgcagtgaaggagtgagctacaagaaaaatgaggtgggcattagaatttatcttgacttgtaatttcacggtctagactaccaattaatattcttctttttccaggttttcttggatgtggtggagagtgttaacatgcttgtcaatagcaatgggcaaataattaggtctgatgtggttggggcattgaagatgagaacatatctgaggtttgctttatactttctttgaaaactagagtttcaagccattatcatgggctattagttaattgggttagcacttagcgctatggttttcattttcttaaatcttcaggggattagggtagggtaagattagattttatgagtagtgaaaggtgaagaagaatgcagcatatgaggatcaggaattcctttaaccagaaaaaaatgaaaaaagaaactcaaaagagcattctgatttctctgaatatctcaaaaggaactccattaaaaaaccacacacatgaaccaacatgtaagcagggaaaactattggtatgaaagaagattcaatggtgaagaggtttcaagtattttttttggcgacctgttctagcaagttgtcactgcgagtgaccattttaacaagcttgtagaaatttttttttgacaatgttttaggcgagcttcaactcccagttactttcccagcaactgctgaaaaactttcgactagttatttctggcatctgtcaagcgctgttgaatttcttcagagaagttattcttcattacctctattgtttgaccacttcatgtcaatctccaattgcctatccttgcttagttgtgtcaactccagcagtgtggacatgtgtttggtgtatttgatcttattcgtacctttgttatcaaattctctgattctgtttagatactctcagctacatttttccatttatactaagatctgatttgttatcaccttgaaatatttgatgtgtttccagttttctgtgattttggataagttttctattcggttacttttaaccatctatccataactataatcactctagccattttgttgtgctgtttctccagcaatgctcatttttccattgttgtatcccatgctatattttatctattttaaaggggtttatttgtgagaagcttaaagcttagtaagcttgagggggatagtcattgcattcacatgtgactcatgtgtctctcacatgttaattgcatttattgttcataaaaaatagtgtatagcatgtagcagtccacttattcatagcctaggaaacagtgctacttagtctgtatatatggacgtttttcatgaaggatatactgctattcacttaagttattccatcctatcatcctttgtttccctaaaaatttacaagcactgcacattttccatcctatcatccttcagcaaaatgctataatgatttgacatcccctgcttctcccagctcaatttgcatctttgcatgcttctatttgcaagttcccatgcttcttacagcctcttccttgtgaccctttttgataaatcaaaattatataaacagctacaaagtgttaaagtcctggtgattagggtacttcagtttaacatctagctgacttgctagttgtggcaaacctcttgtacataatttatatatatacgacagggttgagaggctctttcatacacaagttttgtgttatatatttgttcctagtctctgtttagtaggagtttctactgctttacagtttcacaacccagtctctttagcaaatctaatacatattttttgtggtttatgaatatacctcatttagttctaggaaattctatgctcaaaatgtttcagtggtcccaaatccttaattcaaaatgtttccattggcgaaggtgtttgaattgaagaaattggactggccacatgaatacgtatgtagggaggatattttagtggggtcattgctaaggttgagttaggcctaaaccattttgtaaaacaaaaaatgaggacaattttggtagaacaattctatcagcccagaaagtggccccttaaatgagagaagattttcggtgatcctctctctcctcttagtaattctatcatccgtcttttctctcccttgagtccttatataattaactaaacctcatgtcatttctctcactccattgccaatgccaactcagagcatccctattctttttgaaacttttcctatgacataaagtttagtccaccctcactatttggctctaattggcccatttcttcctcactgttcctttcataatcataacaaaaagtatagtttctgtgcatatcataatcagttttggttaactcaaaacaattattgacttgactctatgcaataacgtgtaatttattgtatccgagtttaacaatcagatgcgtcatacgacttttttaaaattcaaatacttcttgaactggtagtcgggggtatcagtactcgacacaagtaggatatcaatatttttccattttttggagtatctaggcttcattggtgtgatgaatctggatgttcttcctcccatattggttttgattctcttctctcgtaattgtatccaacattttttaaaaatgttgtaaaggtttgctaaaatctaagaagtgcaaatgaaaatagtattttggagtatgtcgttttcttttgctgattagacattggattgcttcactcatttagtatagttaaaattttttaagagttggtgctaacaatacatgattagggaatagttactgttagattaggtattaaatataggtagtaagtagttgtattggaaaactgctatataagttgtttacttattaacattaatttcttgtaccttttgatttccttatgtaattttcttgtataaatagcaaagatcagttgagagataatctatctcttaagctctttttatcatatttttagtctaaagttggtatcagagcgagtcgatccctctatgctagttttacgattctccaccactgtccaccatcatcctccactggcaccatctctacctagtcattgttttgtcaacgttttccaccttttgtcactgtgtctactgctggtgaccacctttttttcgtcaaccgtcgaatttggtgtctcgtcgtgcgatgtccaacccaactcgtcacacatgccatctccatttgctgcagattgacacgtaaaggtcacatgccaccttcccatcaccaaatctactctgcgtcttctccacaaggctcgctagacctccttgttcttgttttggtccttgttcctctagtttcagctttggaagagatgctcctctctcctactctctcatactcttcctccacaattatttgtaaagtttaatagttatcactagttgtggagtgtagattgttggcaaattcttccttcaatatgccttccttttctcaagtggatacaaacattctcaatgttcctttttgtcccaaattgtccttttaacctaatttccttaagtcaattaactaaaaattcaaatttctctataattgttgatgcaaattcttttgttatacaagagcgtagtataggtcgactgattggtgaaagacatgagtctaggggactctactatctaaggcactagatcgtcaaaatcttgtttagcatccccatcatctaagcttctacacgatcactttggtcatccacatttatcaaaattaaaaaggataattcccaattagcaaactccaagtcttagaatgagtcatgtcaattaggaaaacatatttggtcttcttttgcaaaaagaactgaattaggatgcaactttgtcttttctataattcattatgctatttgggtccaagtcgagttttatcctttgagtttcgttattttgtcacttttattgatgaatattctcgttgtacttgggttgggtttacttaatgaatgatcgttttgaactttcgaatatctttgtgtctttctttaatgaaatcgagaaccaatttggccaagtgatcaatattttaaggagtgataatgccaaagattacttttcatctggggttttttcacccttttaaattcacatggcattttgcaccagtccacctgtcctcatgcacctaaacaaaatggtattgtagagagaaagaatagacacttagttgatactagtcataccttgaggcttggtgccaatgtatctgtccatcactagggtgatgccattcttactgcctattatcttattaataaaatgccatcttctttgtacaataaagttccatattccattgtgtttccaaatgaacctttgtttcccatttctcctcaagtctttagttgtgtgtcttttgtacataatgtgcctctaggtttggataaactttcagtatgagttataaaatgcttttttaggatattctcgtattcaagaacggtatcgatttcacttgtctataagtgtcaccttttattgaagaaactcctctcttctcttcctccccacaagatgttaactatgtccaattggtcttacctatggccttagttgagccctttgtgtatcctattcctaacatttttccaacatctcccaataattagcccagttcacctggaccatcttctcatcttatcaccttccaacaactgtctccagtgattgctccaataccacatggtgagtcctcttcatcaagtccttcaccatcattgttccatactatgtctcctgatagtgaagattctagtcggcctacatgccatttgaaaaggtactcgctcttcatgcaatccccatcctatttacaattttataagctatcattgtttctcctcttcttattgttcttttatctcctctgtatcttctgttaccattcctaaaagtgtgaaagagacacttgatcatcctagatggcaacaagccatgattgatgaaatgcaaattcttgaatgtaatggtacatgggacttagtttcttttccacctagacaaaaggttgttggttgtcgttgggtttacaccattatttgggccaaatggtgaagttgatggcctcaaagctagattggtggccaaaggatatactcatatctatgaccttgattatggtgatacattttttgccgcagccaaaatgaccaatgtgtctctggtttgccatgacaactatacgtcattgacctctccatcaattagatataaaaaaatgttttccttcgtgagtgatctagaagaggagatttacatggagcaacctcttggttttgttgtgagggggagtctgacttggtttgtgaattacattctggaaaattcattcatattgttcaaacttatagaatgaaacgcagtgaggcagatcattcagttttttatcatcatacctctcctggaaaaggtgtttatttaattgtgtatgttgatgacatagttattacataaaatgatgctactagaatcttgtagctaaaggaacacttatgtattcacttttagaccaaagccctttgaaaatcttaaatactttctatctaggcattgcagtgggtcaatcaaaggaaggtgttgtagtttctcaaaagaaatatgctttagatatcttggaagaaacatgcatgactgacgatagactagtagatagccatatggatccaaataaaatattaatggttgataaagatgaacccttctttgacccagagagatttagaagacttgttgggaaacttatttatctcactattactagacctgatctatcttttgcagtgggtgttgttagtcaatttatgcaaaatccttgttttgatagttggaatgctagcatccacatcttaagatacttataaaaaggcttcggggcaaggtctgttgtacaaagataaagagaaatacccgaatttcggaatattatgatgctgattgaacataatctcctatggatagatgttccattacaggtattgtgttctcattagaggaaacattatttcttgaaaaatcaagaaacaaaatgtgattgcttgatctagtgttgaagttgaatatagggcaatgatgtctcttgtgaaattgtatataggtgaaacaattccttcaagcattaaaattatgtgagatccaacaaatgaagatgtattgtgataatcaagttgctctccacattgcttccatctagtattccatgagaggactaaacacatagaacttggctgtcattttattcgggaaaagttgctatccaaggaaatttgtattttattgagacctcagattgaatttatttgtttcaaacttggtacatacaatttgtatgcttgagcttgacggggagtgtcagaataggtattgaatataggtagtgagtaattgtattggaaaactactatgagatgtttacttattagcattaatttcttgtaccttttggtgttcgtgatgtaactttcttctataagtaacaaagatcagctgcaatataacaaataaatcttttatgctctttttatcgtattttcagtcttaagtgtacattgaacatagattctactacttggttcattttagagtctactttaacagttgatagtggtttggattaagaagactgtacatttattttgaagtatctattagtataattaaattctgtgctcgagtgttcatctaaatcatgaatattcaatccatggcttgtataatgcagtggtatgcctgagtgtaaacttgggttaaatgatagagtattattagaggcacaaggtagaacaaccaagggaaaagcaattgacttggaggacatcaaatttcatcagtatgtatgcatgattctcttccttatattctctgattgataactgtgagtgcaaatttaaatatatactttctacaagatgtctatgtctattcttgactaattctcaaattatgtgctgacacttgacaaaggtgtgtgcgtttggcccgatttgagaatgaccgaacgatttcctttatccctcctgatgggtcatttgatttaatgacatataggctcagtacacaggtacattttctctatatgagataaaattctgactttgcggtgacatagtaaatagtttacactcatactggagaaaaaactattccaagtttgttgattatctgatctctgtttccaggttaagcctttaatttgggtggaagcacaagttgaaaaccattcaaaaagtcggatcgagattatggtaaaaactaggagtcaatttaaggaacgcaggtattttcttccttcatatctcttcctttttaatctgattaatattgtgtactgactgcacgagtggtttgctctagatttatactactatatgtatttacttccccggctactcagataattgaattttacagtactgccacaaatgttgagatcgagttgcctgtccctgctgacgcaaccaatccaaatgttcggacttcaatgggatctgcgtcatatgcacctgaaaaagatgcattaatctggaaaataagatcatttcccggaggcaaggtattaattcactaggaagttgcattgtacccatgaataacgcccataattgatggcacaatttgattgagagctaatggatctggttctgttgtttgatacgtcaggagtacatgttaagggcagagtttcgtcttcccagtataatagacgaggaagcaactcccgagagaaaagctcccatacgcgtaaaatttgagataccctattttactgtgtctgggattcaggtattgctacgcgtacaacacttttcatatattctgaaaattgctattcctatatgcatctctatatcttattaaaagatgaatatttcctctgttatatatctcctattctgaatcacagtctctgacagtaatggatacaacattgacaaagataatcgaacacggttaagatccacaatataggatactggaacattgcacactacttaaataagagagagagaaaaaactcaaatggaatgaaatatgaacatactaatggtctaattaataatctatatttctatattattacaagttcatctttttcctacgctagcaagcctctctaaaaaatattcagaaacattattttgcaatcactacttggtttctttacaaaagaattccaacaaatgaatgttttttttaatggtactagtgacatgtccattcatagggtcttagctagtgtctgaactgacattttttttatcggacgcctaatgattgtataagagtgtccattataggagtgtctggcatgtataagagttagtgtcaggagcatgttcaacactcacttagaactagataggtgtccacgctacatcgtattgctcacactttccctgtctttatttgtctgttggtgtctcacttatcattttgattacttctcgatgcatgaagcaacgattgtatttttaagtcgatgggtcttctgaaattcatttgttttcacggttgcattgatattccggtcagaaagagtgtttatagatgatattaaattttaaaataactactaatgactaatgggaagaaagaacttgacatcataaatggatgatatactattatacataattttccaacttttctatgattaatagttttgtctagtagtaatgaaacggatgggactaggtaatctgaacgaaacatcaacatccacatgacattgtgtgaaaattatgtttaagtttaccatacattttctttaaattcaaatacaaacaaaaaaaacaggcttagtaagtttaaatacaaacaaatttctactaactctatttaatgttattgtttcaaaaatacgtttatgtttacacaattttgagaatgtactttttgttttattttatgaaattaagaatattaaataaacttagctaacattaatatgaacttaggtaattttcctttatatttgagtctagagatattaggtgtttaaattcaattaatataggtaatgattgattaattaatcaaggagttattcaaccgtgtaaatgttttgatttgtaggtaagatatttgaagattattgagaaaagtgggtatcaggctcttccatgggtgagatacataacaatggctggagagtatgaactgaggctcatttgagatttgtatctttgttttgtattcccgaaatatttgtcgcattcaatgatcgtggatggaaaagggaatctcaggtcaaatgaggttttggccgaccgcatcaaattagaagttactcatagtcttgaaagctgaaaatcatgagttgtcaagtgtaagccagaaactcttatcaagcccctcgctcaaatctgttgtgattgggaaaatggttggttctccctcttctctttttaggccttttctgtaatcacattctgtccatctttttccaacttctccttgtaatttcatcttctttttaaagagaattctagggttttgttttaccaagtaaattactcctatagaccaattatagacaagggagataattgtccctcagctatgtatgaacgataaatacaaatgcattttttaaatatttattcacaaagttttacagatt

SEQ ID NO: 30 - DNA, 9517 bp, Solanum lycopersicum
  source 1..9517: mol_type = genomic DNA
atggcaggggcggcgtccgcgctgttcctccttgacatcaaaggccgggtcctcgtctggcgtgattaccgtggagacgtcacttcagttcaagcggaacgattcttcaccaagctcattgaaaaagaggttcttttttcctctcttttgaatttaatatgagaaattgaaacatttatcacaagttgatgcgctaataaatggttctagtttgaaattggagttagatttgagtttaggagagtggagattggtgtaatttgatgtgaaatgatgccaatttagttaaatagaacggagaaagagttataatttcttttgaagatttcacgtgttttgaattttgaagtttcaaatcttaagtaaatttgtgcaagcataggttcaaggacttatattctatcaataataatgttgtaccactctacttaaaaagagcaaatctcattgagaagtcaaagttaagatgattaatattaaaacaaagttaccttttctctgatatgtatgcctttttatcatctacatttttgtttcttttccaggaagttgatttgttttgatttagtaggagcttgagcagttcgcggtttgctgtgtaatttgattgttatgtgattttatccattgcagggcgatcctctggatcctgtagcatatgataatggcgtgacctatatgtttatacagcataacaatgtgtatctcatgactgcatcaaggcagaactgtaatgcagctagtctccttctgtttctacaccgtgtcgtagatgtaagttatgctgatatttgaggatttgtactctaactatgttaatccaaaatcaattactctctcagttatgagaataatggcagatttcggagtttagggtcaatctgttcaactttcaatatcaatttggacatcaacttctctaattttgaagtaaaatttacatattatatgattataactatattaactgaactatgtatctacgtcacagtattttaaaaataaatttattcttgaaatggaagaactttttttgtttgactcctctaatagttatagtaccgtaaaaatgtaatggagggagtaatggtttcttggttggaacttggggagatttatcattttttatatgttacctttctgacaggtattcaagcattattttgaagagctagaagaagaatcccttcgcgataattttgttgtggtggtatgaggaatatttcatgtctctttaagatcaaaagttagataggaaattgtcattcatattttctcattcagactgagctgatgtttgttgtctttgcagtatgagctacttgatgaaatgatggactttggttatcctcaatataccgaagcaaaaattcttagtgagttcataaaaactgatgcatataggatggaggttacacaaaggcctccaatggcagttacaaatgctgtgtcctggcgtagtgaagggataaattacaagaagaatgaagtaggtatacatgtttatttaagaagatatttttcttcattgggttacatggaagtttgttctttcaggtgtttttggatgttgtggagagtgttaatatacttgtaaacagcaatgggcaaatagtgagatcagatgttgttggtgcactgaagatgagggcatacttgaggtttgctctttgcactgtaaattctttttcctttttttactgaacctaccatctagctcatgcctcagaaggaaaattcatgttaatgtttacctctatttgttttttttcgtttcccccctatccctttggttatctaagattccaaaaattccaactgcaagagtttaacttctttagttagtgtcagatagtattatcagaaacatgattaacaaattatgcattgcacatttatgcatataggtgttgaagaattttgactgagtaccttcttttgtgcttctaatgtaaagatctaagtttcagacaccacttgtttattcttcactggatgtagctgtaaagagctcgccaaatattctttttttcctgaatttcgtcaatcttttatacacgcctcaaagaaattcaccatcaccaatagaattgtttggtagacaagctaattttgatcatcataatctgcgaagtgttcaagtggcagttagaattactaaaatctttcggacaaaattaggcattttaaatgtttcattgcatactcatgttctaggagtgtattggattcttatattaccacgctggactagttcttctatgctctaatcttacaactacctacaattagagtaacctaggcgatgatctgtagaagttccaaggatctctctctctctgtctagatagagagccctctacttaggtggggaagttcattgcttcaattgtcacaaaattgtagataaagattaggggtgtcaaatttagctcataatagaataatccaccagacttgggcagatcgggctgtgtatatgctcattggtctgtcattttgggatagctcaatttagttcctgtgaatgctgcaaagctgtcacatgaaaggtctgggaaaggaaaaactgaaaacctggaattcagtgatctcagtcacatggtggatcatctacatgaaaggaacccatgaatttgtgaagtaaaaggaatttatcatttgcatgaagcatagatgcattttttctactttctttttaaattttttttggtgtaacttggcaattgcaaatgagaaagtggttatgatagaattcttgagcttgttactgatttgtaatgcggctatgggttatgtctctgtaaatactgtgcagcacttcagcaaaatactttctccaataattaaaagaaaggcttgggccaatttggttgcatatgtagcccaaattgattagtaagaaagtcatcaaaacatattatctttttaatgtgtggtttatttgaaatagtcatgataaatgaagaaaacattttttattagtttgagttgataactaaacaaattataaaagaacaaaccaactaatgaaaaccttttgagttgagcagattgcgttatgagttattactcattgtccaacccaaattggccggcctatttgacccaagcaagcatttggtgggttatacattccaacctatatatgactaaagtctaaacttactttaaccaggccaaatgtagccaacttgcccatttgacacccctgatgaaggtgatgaaggtcaagagctgggtaaaactcaatgattaataaatattttgagaggcccacaacaacaatcaattggatgtgcttactctcacgcctcctatccacctagagaaatctgtgggacaccatgtgtggagcctataactgacatgtcctaaagagcgtacatatcctacactttaacctttttattggtgggttacactatgtaagggccaattttggcactcctatgttaaatcttttaagtaccaaagtcagaatggaaattagttcccttttccactttgtttatgttcccttttagaaactaatacaaggccttcaagcgctagtgcattctctatcaccttcaaagatgttccaactgcacatttgtttaatatttgaatgcaagtctcttccccaaaccttttgatttaataaagagagaactgcatataagtacagtccacacacatacattgcaaccaggtggccatgtgcccattgtttatggttcatcactcttgttaaatatttgagtgcaagtcccttcttcaaacattttgatttaataaagagagaattacatacaagtatagtccagacacatacattgtgaccaggtggcctgtaaacaactttgcaaagttgaagccctaaaataataggtcaagattcaacatcaaagtcctaataggttctcgaagttgctattcagtttcttttttaaaaaagcgcaagcttctaactcaatctccgaatcagtaattgtgactcaaacattagttcaacaaatcaaatgcatttgggtggtgatttagatttttaaaataatccaccattactggaaaaaattaattaactgtgtttaaaattcaaatatgatttcgtgagaaatttggatttttgagttggtggtgttttaaacttgtcagaaatagtctaaggaagctgtatacccatatatacgattatacaaaaactgacttcctcttcttactagtgcctcctcttaaatttaactcaagtttaagtttcaaagacctcttgaagtttccagttaattggaacaaaacccaacccaaacaactaacaaactcaaaaaacccaatttccaaatatagctttgaagtgggttcaatgataacttttatttttcaagttctcaatcaaccacaataaatcaaccaaattaaagccctaaaattggcattgatatttatatacaaccatggatgaaggcgagtgcatgacagagaagcaccttagcaataaagtagaagtgaaaaagaaagcccatcaaaagcatcttccaatctgtctttccacccggctaaggcttgcagagtaatatgtgatgcattcaggccatcaatgagttcatctgttttactgctccatactgcttaaaagaacataatgaaaaacttttggactgaagtttgtttatatatgcaataaccccaagattcgacattcatcattatgaattttttactttggacactagattaaaactgaagagagtgaaaagggactagaggtgacacttcattaacattgaagatgaaaagaatgagcgctgggaaaagaacgaagcagaaggaagaaagagacaaaaggagaaaaaagggttattgccccaaggaatgaaaacaatcaagttatatacaaagtgggtcaaattgggtaagaaggtaaaacgtgagctaattttagtagcattgttacccgaccttacagagagtaactttttctgtaacaaagatgatcaacttgtgggggcaatactttgagaagtacatccccaaacatttacataatttcactccagaaggagatgactgtccaacatgtttggaggtttctaggtggagatggttttttggatttgaggtttaggtgaaactttcatagttggaatgtgccagagttccaaaatctgactactttgcttcacaagcaaagtacttcagaagataggcacggcgtatggaattggaaggctgggaaaaatggagtgttttctattaactcatattatcggaagcttctaattagggaggaggttgccgttccatataactcgagttggatctccattttatcattggtttttttcacttggctatcaattagaggggaggggtgattttgactgctgagatgcttgaggagatgaaggttctgtgcattaattggtgctttatgtgtaagggttcggaggaagatgtcaaccattttctcataattgtcaggtagctttgaggtcatggtgggaaattctagtttggtttggaatcagttggctgatgtcagacactgtgaaagaagccatgtccagttggagttttgatagaatgaagaagaagagacacaggtcttggaacgttctccactagctcttatgtgagttgtctggagagaaatatgagagctttcgaaattcaaaggtgtagagatgaattttatgcgaataaggagtaacctcttattacttttttccttttagagtactgatgaggtctgtttatgtatagaatagaagattgtgtgtcgttcgttacaaaaactattttcttgtaggtttgctacttattggtattcttcttgtatacaggcacattttgcccaaacatcaatagtatttattactttatcaacaacaacaacaacataataataacaacaacagcaacaacaatgtgtctacttgttagtgtgtgagttgtttttttacctgaactttttcagttttcggtgagctctttattccacatctgttggagtgtcactatcttatcttctatttgaatatctgggacattttagggatacaagttgaatgccaggtagtttttccgtgttgattcagaagacacttagttccacttcttaaacgtcatggttatcagtccctcacgtgtgaattgttggtattatcctactgtatatagagtgactgttatctgaatatacatttttttgtttcttttttgcagtggcatgcctgagtgtaagcttggtcttaatgatagaatgttgctggaagcacaagggcgaactaccaaggggaaggccattgatcttgatgatatcaagtttcatcagtatgaaatttgttcagttatttctttttgtgggattatgatatattggtttcctgccaaacggagttatgtgggttggccattgattaagttgcataacatgcttctcaaagatgaaatactttactaaatagcgcggcctggaaagtcaaacctatcactttaaaaggaatttagtgaagtatgtggttgttgaaccagcaacctgtacctcccgcacaatttttcaaatgataaatcctggaggcttttatccatgtcttgagtcttgtctagttttgaatagtaacccatttcactatcttattgcccttctctttctcttccactaatttaggtgtgttcgcttggcccgatttgaaaatgatcgcactatatcatttataccgccagatggagcctttgatcttatgacctacagacttggtactcaggtaaattatgagcttgttgggtcttgtattacttttagttcccttgtggatgttcttaagcaaaattgtttaaacccttgatggtaattgtctcaggtaaagcctctcatatgggtggaagctcaagtggaaaggcattctaggagccgtatggaaattgtggttaaagcacggagccagttcaaggaacgaaggtatgatgtgtatcaagtattacagtgaaaaactcagctaattagatgcgccattttacttatactgtgtattgcatgcattatgctataacaaagttttccatgtccagttatgagtttcttcaataatttcagtactgcaactaatgttgaaattgagttacctgtggcaacggatgctacaaatccaaatgtccgaacatcaatgggatcatctacttatgcacctgaaaaagatgcactgatttggaaaataaaatctttcccaggtggtaaggttagtgttgacttgatcatagttgaagttttaactcattgtttaacttttctgattgttctcttgttgacatttgcctatatgtaatgccatttctttttcaggaatatatgttgagagcggagtttactcttcccagtattacagcagaagaatcagttcctgagagaaaagctcctatacgtgtgaaatttgaaattccttattttactgtttctggtatacaggtaagccctcgactctttttcctattctaagatcagcaatttatccatagaaatatatttgttcaagaagggttccaaaagatgttgattgtaaatgtaaagaccacactccacagttgtggctctcagaaagagtattacaaaggcatagtcgtactaacccctaaaagcattggttttacttagtcgtagacttccaagtctgcattcccttatttctgtaatctttaggcccatgttgatatccttgcttggtctatcatattaagaaaccaccgagtctcggatgagctgttaattctatgtacttgattagttctcaggctgggatggcaggaggggagtcagatgggattaggaattaggacttacagtgagtgttggcacttcaaatggtattgggaatttagggttattgtagtgcaaaggcatattggggataatgaggtgatgtggctggttcgattctgctgtagacgcacattgtaaaaatcttagaattggcacaacagaacacaaaatgtccatttagttgaactcctttttaaattattttccttgctagtggttattgttggtattgcttgacactgcaatatgaaaagagaggcagggcgggggttctgtgctggaagagggcaatgtatagctgattgtcatctttatgcccaacaactgcatatactaaagtctaattaaccatggtcaacattatctgatttcctggtaaggtgtaggctgtaatactacaattaaccagccgaataaacttcaaattatttaaaggtggagatgagcttataagacaccaactatactgactagtaagtggattccaattaggcactcagagttccccacatgccttcccaaagaacacgaagtaacaatctgcagtagtcaaacttttcctcagatctaatctggctctgctgtgtagatcaagctgtcacctatagtatatcttgccttctatgacttttctcctttgttcagtgctggaagtttatttatatatatatatatagagagagagagagagatggtaacaaacttatatttcaaaagaggctgtggagccataattataatgagtgtgagcaaaacctaaattagacaaaaactatgttaaacagactctaaaacttggattagagtctcagtgtcacatatgtactcctgtttacaccaaaaccaaaaaaagcaaaatacttctgtactgggttgctctttccatcaaaacatcttagattccttcctctttagatttgtccaccatatgcagcctgagatcatactccatctatttttttaaaaaataaatctttagtgcctccctttctgttctagctggaaatcatcagtgtaatcattggcactgaccaattcaaaccaatcatagcaaaaagtacgtcccagagttctttgtcactctacagaacaaaaaaaggtgactctttgtttctgcatacttaccacataagtggcactggagcaaagttgtattcccctcctctgcagcctgtcccgagtcgaacaagcttgcttgattaccagccaaataaaacaagccacctagtatgggatttgttccccgtgcttcaaaggcccataacaaaacaagcatatttttgttttaatctgttctctaagctgaatagctgatatagcatgttcttgacattgcaataatatgtatttaatgaatgtcaggttcgctacttgaagattattgagaaaagtggctatcaggctcttccatgggtgagatatattactatggctggtgaatacgagttaagactagtataaggtcaaagcacagatgatgtttctagccaattgagtttgtagaaggcctcagttaactcccaagttctagaattttgagctgcttggcaaaaggcaactgctcgttcaaaccggatgttaaacaatattttccagggaccgttttgttgtttgtaatcgactcttatatgtaatagtgttcattttcttgtatcataaacttatgacggtaagtttcatatccaatatttcttcaaggcagattccaacttcctattg

SEQ ID NO: 31 - DNA, 10116 bp, Solanum tuberosum
  source 1..10116: mol_type = genomic DNA
gcaaatgacaacaacttgatcaaaatttcgatctcaaaacccatactttaacgaacgcatgaagattcactgcggagcttatatttgatcgtttttactctaccaccagcagatctccaccggaaagcttctctacgacagcttttcctatctgcgatattgatcggaatccgtagtacttcacatggcaggggcggcgtccgcgctgttcctccttgacatcaaaggccgggtgctcgtctggcgtgattaccgtggagacgtcacttccgttcaagcggaacgattcttcaccaagctcattgaaaaagaggttcttttttcctctctctttcgaatttaatgtcgaaataattgtatacgagaaattgaaatatttggttgaagatatcacaagttgatgcgcttataaatggctctagtttgaaattggagttagatttgagttcaggagagtggaaattggtgtaatttaatttgaaattatgcaaatttagttaaatagaatggagagagagttatcttttgatgatttcacatgtttgaattttgaaatttcaaattttaagtaattttgtgcaagcattggttcaaagacttatattcgatcaataattatgttgaaccactctacttaaaaagagcaaatctcattgagaagtcaaagttaagatgattaatattaacacaaagttaccttttctctgatatgtatacctttttatcatctacatttttgtttcttttccaggcagttgaattgttttgatttagtaggagcttgagcagtttacggtttactgtgtaatttgattgttatgtgattttatccattgcagggtgatcctctggatcctgtagcatatgataatggcgtgacctatatgtttatacagcataacaatgtgtatctcatgactgcatcaaggcagaactgtaatgcagctagtctccttctgtttctacaccgtgtcgtagatgtaagttatgctgatatttgaggatgtgtgctcttactgtgttaatccaaaaatcaattacattctcagttatgagaaaaatggcagacttcagagtttagggtcaatctgttcaactttcagtctcaatttggacatcaacttctttaattttaaagtaaaatttacatattatatacttataagtatattaactgtactatgtgtctacgtcacagtattttataattaaatttattcttgaaatggaagaactttttttgtttgactcctctaatagttatagtaccgtaaaaatgtaatggagggagtaatggttttcttggttggaacttgggaagatttatcattttttattttacctttctgacaggtattcaagcattattttgaagagttagaagaagaatcccttcgcgataatttcgttgtagtggtatgaggaatatttcatgtctctttaagatcaaaagtcagataggaaattgtcattcatattggctcattcggacggagctgatgttctttgtctttgcagtatgagctactggatgaaatgatggactttggttatcctcaatatactgaagcaaaaattctcagtgagttcataaaaactgatgcatataggatggaggttacacaaaggcctccaatggcagttacaaatgctgtgtcctggcgtagtgaagggataaactacaagaagaatgaagtaggtatacatgtttatttaagagagtattttttcttcattgggttacatggaagtttgttctttcaggtgtttttggatgttgtggagagtgttaatatacttgtaaacagcaacgggcaaatagtgagatcagatgttgttggtgcactgaagatgagggcatacttgaggtttgctctttgcactgtatattcttgttccttttttactgaacctaccatctagctcatgcctcagaaggaaaattcatgttaatatttacctctatttgtttttttcgtttcccccctatccctttggttaatttaagattccaagaattccaactgcaagaatttaacttctttagttagtgtcagatagtattatcagaaacatgattcacaaatcatgccttgcacatttatgcatataggtgtttaagaattttgacatactatgttcttttgtgcttctaatgtaaagatcaaaatttcagacacaacttgtttattcttcactgaatgtagctgtaaagagctcgccaaatattttttttcctgaatttcgtcaatcttttatacatgccgcaaacaaattcaccatcaccaatagaattgtttggtatacaagctaattttgaccatcataatctgcaaagtgttcaagtggcagttagaattactaaaatattttggacaaaattaggcatttttaatgtttcattgcatactcatgttctaggagtgtattggattcttatattaccacgctggactagttcttctttgctctaatcttacaactacctacaattagagtaacctaggcgtcgttctgtagaagttccaaggatatctctctctctctctctctagatagagagccctctacttaggtggggaagttcattgcttcaatggtcacaaaattgtagataaagattaggggtgtcaaatttagctcataaaagaataatccaccagacatgggcagatcgggctgtgtatatgctcattggtctgtcattttgggatagcccaatttagtccctgtaaacgctgcaaagctgtcacatgaaaggtctgggaaaggaaaagctgaaaacctggaattcagtgatcagtcacatggtggatcatctacatgagaggaacacgtgaatttgtgaaagcaaaaggaattcgtcatttgcatgaagcatagatgcattttttctacttttatttttattttggtgtaacatggcaattgcaaatgacaaagaggttatgatagaactcttgagctcattactgatttgtaatgcggctatgggctatgtctctgtaaatactgtgcagcacttcagcaaaatactttctccaataactaaaagaaaggcttgggtcaatttggttgcatatgtggcccaaattgattaataagaaagttatcaaatcatagaatcttttttatgtgtggtttgtttgaaatagtcatgataaatgaagaaaaggtttttttattagtttgagttgataactaaacaaattataaaagaacaaaccaacaaatgaaaaccttttgagttgagcagattgggttatgagttatgactcattgttcaacccaaattggccggcctatttgacccaagcaaacatttggtgggttatataacccaacccatttattgactgaacttactttaaccaggccaaatgtagccaacttgcccatttgacacccctgatgaaggtcaatagctgggtaaaactcaacgattaataaatattctgagaggcccacagcaacaatcaattggatgcgcttactgtcacgcctcctatccacctagagaaatctgcgggacaccatgtgtggagcctataactgatatgtcctaatgagcgtacgtatcctacactttaacctttttattggtgggttacactatgtaagggccaattttggcactcctatgttaagtcttttaagtaccaaagtcagagtggaaattagttcccttttccactttgtttatgttcccttttagaaactaatacaaggccttcaacctctagtgcattctctatcaccttcaaagatgttccaactgcatatttgtttaatatttgaatgcaagtctcttctccaagccttttgatttaataaagagagaactgcatataagtacagtccacacacatacattgcaaccaggtggccatgtgcccactgtttatggttcatcacatttgttaaatatttgaatgcaagtccttcttcaaaccttttgatttaataaagagagaattacatacaagtatagtccacacacatacattgtgaccaggtggcctatatacaacttcgcagagctgtagcctaaaataataggccaagattcaacatcaaactccaaataggttctcgaatttgctattcagtttcttttctaaaaaagctcaagcttctaactcaatctccgaatcagtaattgtgactcaaacattagttcaacaaatcaaatccatttgggtggtgattagatttttaaagtaatccaccattgttgaaaaaaattaaataactggctttaaaattcaaatatgattttgtgagaaatttggattttggagtgagtgttgtttaaactatagtcagaaatagtctaaggaagctgtatacccatatataagattatacaaaaactgacttcctcttcttactagagcctcttcttaaatttaactcaaatctaactcaagtttaagtttcgaacacctcttgaagtttccaatcaattggaacaacacccaacccaaacaactaacaaactcaaaaaaccaatttccaaatcatagctttgaagtgggttcaatgataacttttatatttcaagttttcaatcaaccacaataaatcaaccaaattaagccctaaagttggcattaatatttatatacaaccatggatgaaggtgggtgcatggtagagaagcattatagcaataaagtagaagggaaaaagaaagcccatcaaaagcatcttccaatctgtcttcccacctagctaaggcttgtagagtaatatgtgatgaaagcccatcaaaagaatcttccaatctgtcttcccacctagctaaggcttgtagagtaatatgtgatgaaagcccatcaaaagaatcttccaatctgtcttcccacctagctaaggcttgtagagtaatatgtgatgaaagcccatcaaaagaatcttccaatctgtcttcccacctagctaaggcttgtagagtaatatgtgatgaaagcccatcaaaagaatcttccaatctgtcttcccacctagctaaggcttgtagagtaatatgtgatgaaagcccatcaaaagaatcttccaatctgtcttcccacctagctaaggcttgtagagtaatatgtgatgaaagcccatcaaaagaatcttccaatctgtcttcccacctagctaaggcttgtagagtaatatgtgatgcattcaggccatcaacgagttcatctgttctactactccatactgtttaaaagaacatgacgaaaaacttttggactgaagtttgtttatatatgcaataaccccaagatccgacattcatcattatgaattttttaatttggacactagattaaaactgaagagagtggaaaaggactagaggtgacacttcattaacattgaagatgaaaagaatgagcgctgggaaaagaactaagcagaaggaagaaagagacaaggagaaaaaagggttagaagtaggtctttaatgttgccccaaggaatgaaaaatattcaagttatatacaaagtgggtcaaattgggtaagaaggtaaaatgtgagctaattttagtagcattgttacccgaacttatggagagtaattttttctgtaacaaaggtgatctacttatgggggcaatactttgagaagtacatccccaaacatttacataatttcactccagaagaagatgactgtccaacatgtttggaggtttctaggtggagatggtttttaggattcgaggtttaggtgaaactttcagaactggaatgtgccagagttccaaaatctgactactttgcttgtgaagcaaagtacctcagaagataggcacggcgtatggagttggaaggtggggaaaaatggagtgttttctactaactcatattatcggaagcttctaattagggaggaggttgtcgttccatataactcgagttggatctcagagttatcattgattttttcactcggctatcaattagaggggaggggtgtttttgacggctgagatgcttagggagatgaaggttctgtgcattaattggtgctttatgtgtaagggttcggatgaagatgtcaaccatcttctcttaaattgtcaggtagctttgaggttatggtgggaaattctaggttggtttggaatcaggtggctgatggctgatgtcagacactgtgaaagaagccatgtccagtaggagttttggtagaatgaagaaaaagagacgcaggtcttggaacgtttctccactagctcttatgtgagttgtctggagagaaatatgagagctttcgaaattcaaaggtgtagagatgaattttgtacgaataaggaataacctcttattacttatttccttttagagtactgatgaggtttgtttatgtatagaatagaagattgtgtgtcgttcgttacaaaaagtattttcttgtaggttttctacttattggtattcttcttgtatacaggcacatttttcccaaacatcaatagtatttattactttatcaacaacaacaacaataataataataataattaaaaaaaaaaaatgtgtctagttgttagtgtgtgagttgttcttttacctgaactttttcagtttccggtgagctctttattccacatctgttggagtgtcactatcttatcttctatttgaatatctgggacattttgggggtacaagttgaatgtctggtagtttttctgtgttgattcagaaaacagttagttccactacttaaacatcatgtttatcagtccctcacgtgtgaattgttggtattaccctactgtatatagagtgactgttatctgaatatacattttattgtttcttttttgcagtggcatgcctgagtgtaagcttggtcttaatgatagaatgttgctggaagcacaagggcgaactaccaaggggaaggccattgatcttgatgatatcaagtttcatcagtatgaaattgttcagttatttctttttgtgggattatgatatattggtctctcatgtcaaacagagttatgtgggttggccattgatttacttgcataacatgcttctcaaagatgaaatactttactaaatagcgcggcctggaaagtcaaacctattactttaaaaggaatttagtgaagtatgtggttgttgaaccagcaacctgtacctcccgcacaatttgtcaaatgataaatcctgaaggcttttatccatgtcttgagtcttggccagtttcaaatagtaacccatttctctatcttattgcccttctctttctcttcaactaattttgcttctaatttaggtgtgttcgcttggcccgatttgaaaatgatcgcactatatcatttataccgccagatggagcctttgatcttatgacctacagacttggtactcaggtaaattatgagcttgctgggtcttgtattacttttagttcccttgtggacgttcttaagcaaaattgtttaaatccttgatggtaattgtctcaggtaaagcctctcatatgggtagaagctcaagtggaaagacattctaggagccgtatggaaattgtggttaaagcacggagccagttcaaggaacgaaggtatgatgtgtatcaaatattacagtgaaaaattcagctaattagatgcgccattttactttgtactgtgtattgcatgcattatgttataacaaagttttccatgtccagttatgagtttcttcaataatttcagtactgcaactaatgttgaaattgagttacctgtggcaacggacgctacaaatccaaatgtccgaacatcaatgggatcatctacttatgcacctgaaaaagatgcactgatttggaaaataaaatctttcccaggtggtaaggtaagtgttgacttgatcatagttgaagttttaactcattgtttaacttttctgattgttctcttgttgacatctgcctatatgtattgccatttctttttcaggaatatatgttgagagcggagtttactcttcccagtattacagcggaagaatcagttcctgagagaaaagctcctatacgtgtgaaatttgaaattccttattttactgtttctggtatacaggtaagccctcgactctttttcctattcaaagatcagctatttatccatagaaatatatttgttcaagaagggttccaaaagatgttgattgtaaatgtaaagaccacactccacaattgtggctctcagaaagagtattacaaaggcatagtcgtactaacccctaaaggcattggttttacttagtcgtagacttccaagtcttctttcccttatttctgtaatctttaggcccatgttgatatccttgcttggtctatcatattaagaaaccactgagtctcggatgagcggttaactctatgtacttgattagttctcagactgggaaggtaggaggggagtcagatgacattaggaattagcactaacaagtactgtaagggttgacacttcaaatgggattgggaattaagggttattgtacatgtaaaggcatattggggataatgaggtgatgtggctggttcaattctgctgtagacgcacattggaaaaaacttagaactggcacaacagaacacaaaatgccatttagttaaactcctttttaagttattttccttgctagtggttattgttggtattgcttgacagtgcaatatgaaaagaaaggcagggcgggggttctgtgctggaagagagcaatgtatagctgattgtcatctttatgcccaacaactgcatatactaaagaagtctaattaaccatggtcaacgatatctgatttcctggtaaggtataggctgtaatactacaattaaccggccgaataaacttcaaattatttaaaagtggagatgagcttataagacaccaacaatactgactagtaagtggattccacttaggcactcagagttccccacatgccttcccaaagaacaggaagtaacaatctgcagtggtcaaacttttcctcagatctaatctggctctgctgtgttgatcaaactgtcacctatagtatatcttgccttctatgacttttctcctttgttcagtgctggaggtcttttatatggcaactcaagcataagtgtgagcaaaacctaaattagacaaaaactatgttaaacagactctaaaacttggattagagcctcagtgtcacgtacgtactcctgtttacaccaaaactaaaaaagcaaaatacaactaaactttatcttctgtattgggttgttctttccatcaaaacatcttagattccttcctctttagatttgtccaccatatgcagcctgatatcatactccatcttttttttaaaaaaaataaatctttagtgcctccctttctgttccagctggaaatcatcagtgtagtcattggcactgaccaattcaaaccaatcatagcaaaaaggacgtcccagagttcttagtcactctacagaacaaaaaagaggtgaccatttgtttctgcatacgtcccacataagtggcactagagcaaagttatattcccctcctctgcagcctgtcctggcttgattaccagccaaataaaacaagccacctagtatgggatcttagttctctgtgcttcataggcccataacaaaacaagcatatttttgttttcatctgttctctaagctgatatagcatgttcttgacattgcaataatatgtattgtttaatgaatgtcaggttcgctacttgaagattattgagaaaagtggctatcaggctcttccatgggtgagatatattactatggctggtgaatacgagctaagactagtataaggtcaaagcacagatgatgtttccagccaattgagtttgtagaaggcctcaggtaactcccaagttctaaaattttgagctgcttggcaaaaggcaactgctcgttcacaccggaagttaaacaaaatattttccagggccagttttgttgtttgtaatagactcttatatgtagtagtgttcatttgcttgtatcataaacttttgacgataagtttcatatcaatgtttcttcaaggcagattccaacttcctattgcttgta

SEQ ID NO: 32 - DNA, 27801 bp, Solanum tuberosum
  source 1..27801: mol_type = genomic DNA
  misc_feature 1357..1385: note = n is a, c, g, or t
  misc_feature 26077..26528: note = n is a, c, g, or t
tagtcggagctacatttggataacaaagcaaacaaatgcaatgaataatgtgaaaaattgagttagctgattggaaaatccatctgaaactatagtgccttcaatcataacaaattacaaaatcaattctcaatcacctctagatctcatcggagatcgctatattcgccgattctgattcgcgatctggttcatcacatggcaggggcggcatcggcgctgttcctccttgacatcaaaggcagagtactggtttggcgcgatttccgtggagatgtctcctccgtccaggccgaacgattcttcaccaagctccttgagaaagaggttttctcttgctcttttttgtcttatctccagatttatttgtcaaaatgtctgcacatttcgactacgatcagaagacagatctagaatgtacaagactcagtttgttcggaattgtaactcgatttagaagcaaatgccactgctcgcttgaagcagtatcttcacttctcttaatttatattgccaattttatttaacttggaaatgcaagtttgcctccgagactagagttatgcaaattaatacttttactggagatgctgcattttaaagctaaatagactttatctaagttaatgtctttagtgggaatgctgcattttaatgctaaatagagtaaacaggaatgaaaggtcttataagtggtttagcacgtttgaaatcttgtagtttggtaaatatgttcgttgaagcttcaatctgagttattatgcatgaatgaatttccattggttaggatgcctcttttctaaatgatgaaaatgttgtgaaaagagaatcaagttaggaagttatagttgagttgatacagatttcaatagtttcttcgcattctgcaggtttatattgatcttcgttttgtttctttcgtagacagctgactatgaaccacttagttggagaagatagagtttactttttctgactaatttaagtgctaaactttgatcacttgcagggtgaccctcaagatcctgttgcatatgataatggcgtgacatatatgtttatacagcacaataatgtatacctcatgaccgcatcaaggcagaattgtaatgctgctagtattcttctgtttctacaccgtgttgttgatgtaagtgacattgacatttgcttacttcacctgatttagcacaatttctatgcatgcaagtaattcaatcaccagatctaaacttctagtacataaagctttattgtgaagaagagagaagaaatttgtttaatcatctgtgccaaaatgaactaccttgcactaatacattgacaaagcctattaaactgctcttctacgcccccnnnnnnnnnnnnnnnnnnnnnnnnnnnnnccccaactaaccaactgtcaccaaaatttggcgttgtgatggcaccttggtacttgaaactacccaggtcatccaaaagagaggtattgtagtatgaagagacaatagatagtaacaaaaacaatggatagtagcagaatagtactacaacaatttaatactatgatcaaacaacacggaactacagatagtaacatcaatcgaagaacaaaaaactacaagagtagtattacaactattagtaagggaaacaagacaatgcactcctacctactagtatggacgcactactactccctctgtatcattttatgtggcaccgtttgacttggcatggtgtttaagcaaaaaagaaagatgttaggattcttagagaaggatcgagtcacaggacgatgaacagggaaatcaaattcaactgcctttgattttcccttgcttttgttcgaattcctagatcgacctatttttgtataattcagctcatcaaagggaagctaaaaccttagagttcttgtttctgattaaaatctgcgtacttcttattcctcaaatcctcctttaaataggagtcttcttacagtaataggaagtcttatggaactaggaaacataaatcctattctaaactaataagaaaactactaacaatatataatcaaattcttcctattctagaataataataaactactagcgttataattaaatcaagttatttggctctctgtcgcacatatttcttgcccacaaatgcgtccacaacattacccccctcatgctgaaagagctgtcctcaagctcgaacgatggataagccttcttaaaacaatctacatcctcccaggtcgcttcatcctccgtcattcccgaccattgtataagaatctcctttgtacctcggtttaaacgagctttcatgacatcagcaggcaaaggaactactcggccatcctctagtgctggtagctctgtaataggtgggagttggtcgcctttgaatgccttcaaaagggaaacatgaaaaacgttatgaagtcgactgtcatttggcaaatccaactcatatgcaacctgtccaattcgccgtaagattgaaaatggaccataaaatttgggggacaatttattatgaatacttagccgcatggagcagcggcctgcaaggatgtaaacaaagccatacaagtgaccccggagcaaattcgacgtcacgatggcccttatcataatattccttcattcgttgttgtgcggatatcacccaagatgtgatcacattctagcaatgcatgttcaacagcttctacccgagtggtcccaggcacatatgaaagcaaacgaggtgagtcatgaccataaacaaccttgaagggtgtggtttgcaatgccgaatgaaaagatgtgttataacaaaattctgcccatgggacccaagcaacccactttcgaggacaagtaccaacaaagcagcgaagatacatttcaacagtacggttaacaacctctgtatgcccatctgtttgtgggtggtaagcagatgagaattgtagtttagtaccattcaagcgaaaaaagttccttccaaaaagtgctagtaaaaccacatctctatcacaagtaatagtttcaggtatcccatgcaatgcaagcaaacaatctactaaaaaaatacctgagccacacgagcagctgtgtatgagtgagccaatggtatgaaatgagcatattttgagaaccaatccactattacaaacaagactgacttcccccaagacttgggcaagccatcaataaaatccatggagatgtctgaccagatctgagttgggaagctggagaggttgtaacaatcctgtgggacttaaatgtttagatttattgcgttgacacatcgggcaggcaatgacatatgcagcaatgttcgttttcatacctttccagtagaaatctccacgaattcggtgtaacgttttttgtattccttcatgggcactatcatgataagtagaaagtatagtaggtagcaaaggagaattctgtaaaaggtagatgcgacctttaaacaaaagcaacccatcctgaacttgacagtccgaatccaaatctcctaccttgactttatcatacaaccctaacaattctgatgatcctgtaagctcctcccggatggtgtccagtaatgtgctacgaggggagctaatagcattcaaagaagggtcctcatgtgtcattctagataaagcatacgcagctttattgagacaaccagcccgatactccattgtaaaatcgtaacccatgagtttactcaaccaatgttgttgaggtggtgtagttagcccatctagcaagtattttagcctgtaatgatcttttcggataagaaaagggcgcccccacaagtatggccgccaatgttgtactgcctttgcaaggccaatcaactccctctcatatgcagctaatttttggtgacgagctgctaactgtcggctaaaaaaggctacgggctgaccttcctgttgcaaaacagcccctataccacctacagaagcatcacattctataatgaaattcatagtaaaatcgggcaacccgagtatgggagcagaggataaggcttgctgaagcttctggaatgcatctagggtcaaatcgctccactggaaggagtttttcttgagtagactagtcagaggtgctgccagttgcccatagtcacaaataaatttgcggtagtaacctgtcaatcccaagaacccacgaagaggtgcaattgattgcggttgaggccaatttaaaattgcttgtactttgctcctatctacctccacacctgtaactgaaataatatgccccaaatatgcgatttgagttgtaccaaagcaacatttagattgtttcaaatataatcggtgtgcgcgcaataacaaaaatacctttggcacgtgaaccaaatggtcctctcaacaactgctataaattaggatatcatcaaagaaaaccaacacaaagtggcgtaagaactcatgaaagacctcattcatcaaagcttggaaagtagatggggcattagtgagtccaaacggcatgacaaggaactcaaagtgcctgtgatgagttcgaaaggttgtctttccacatctacaggagacatgcggacttgatggtatccagatcgcaaatctagtttagtaaagtacttgaccccatgtaactcatctagtaactcgtccactactggaattgggaacttgtcgttgactgttttggcattcagttcacggtaatcaatacaaaggcgccaagacccatctttcttagataccaataacacaggtgaagaaaaaggggacttgcttggtcatatcaatccttgttgcaacatctgattacattgcttctcaatctcatccttttgccgatgagggtatcgataaggacgaacaactacaggagctgttccgggcagcaaactaatgcggtggtcacattgtctcaatggtggtaaactcttaggttcctcgaacatatcatcgaactcggtcaaaaggcatttcagtcgttgctcatcagtaattgcctttcctagcagatgcaaagcctttccacaatacccttgttgtccctgaaacaaaagtaatttcccttccaccgaaaaactcatagtaagtgccgcaaagtcccaaagtataggacccaaagactgtaaccacttcactcccaaaacaatatcaaatccacccaagggaataacataaaggtctacaataaagctatgttcaccaatagaaattgttacccctgtgcagacccccaagcattgaactttctcttttttagcaatggaaattctgatgttgtgcaaggaaaaaacatcaaggagtaatcgactagcagctgtagaacttataaaattgtgggtacttccagaatcaataagactaagcatgtgatgtctgttaatgagtgcagtcaattgcatagtttgtgcatgcctttgacctgtaattgcatgtgaagaaattttcgggcagtcatccgacacttccggaattgcgtcatcaactgaatcatccaattccaaccagaaaagccgtttacatcggtgagtggctgaatattgttcgtcacaattatagcataatcctttagctcttctctccgccatttctacatgagttaatcgcttgaaaaaagggggttggttgctagtttggatattcgtcgaggtagatgagccaactagaccagtattagactttaatgagttcactgtgcggccatgattgtccaagactgctgccatgcagctttgcgagtgttactgactctttgctattgctgtttttgctgtaaagccctggctatactcaaagccgtcgataagtcaggtgatttgagcaattgtacgtccaatttgattgaatcatccaaccctgccataaatatacccacgtgcaagtgttctggaataagctcatcagccctaaccaacttttcttgaaactgacgttgataaatttcaactaaaccagtttgtcaaagtgtgactagttcacccgccgggttgctgctttcaggaggtccaaatcgctggaaacatcgtttatgaaaatcttcccgactcattggacccttcactcgtttaaactgataataccataattgtgcttctcctaacaagtgaaacccagcgactccaaccttttctgcatcaactgtatgttgattttcaaaaaattgttcacaacgatgtgcccaaattaatgggttgttggtgccatcataagtaggaaaatccttccttgcataccttggtattgtcaaattggaatttccactaatttgatgattctgatcagccggttgaatatgcagcgtattacctctaggagccggatttattgatctacctgctgtcggagcactactggtctctgccccatggactgttagttttgtagagccaattcccaagctagaaaattgttcttgaatagcttggacaattttttcaccgagacgttccatcgctgcaagtttagagtccattagtgtttctgttatcacacattcttcttgaaacttggaattgatcttatcatccattgtgttaggctctggtaccaaattgttaggattcttagagaaggatcgagtcacaggatgatgaacagggaaatcaaattcaactgcctttgattttcccttgcttttgttcgaatttctagattgagctatttttgtatatgaattcagctcatcaaaaggaagttgaaaccttagaattcaatagaagagagaactcctatctcttgtttctgattaaaatctgcgtacttcttattcctcaaatcctcctttaaataggagtcttcttatagtaataggaagttttatggaacttggaaacataaatactattctaaactaataagaaaactactaacaatatataattaaattcttcctattctagaataataataaaactactagcgttataattaaatcaagttatttggctctctgtcacacatatgtctttcccacaaatgcgtccacaacaaaagactttagaaacttgtggtgtaaaacaatccttagatatttatgtggtggtaaatcatttcattaaggataaagtaaaaaagaaatttgaaagttaaactgtttctaattatagtatttttggatggactaacaaggaacacataaaatggaacggagggagtacttactaacccttctgccctaattcacgtccttcacacctttctatccatggtcatgttctcggtatgctgcaattgcaccatgtcttgtctaatcgcctttctctaatatttcttcggtttacctctacctttcttgaatccatccatagacaacctctcacacctctgcactggggtaatcatgcatctcctcatcacatggccgaaccatctcaacctcgcttcccacatcttgtctaccactgaagtcactcccaccttatctcagatattctcagttttaattctatctctcctagtatactcacacatctatcgcaacatcctcatctctgccacttttatcttttgaatgtgagagttcttgattggccaacaccctgccccatacaacatagttggtctaatcaccactctataaaacttgcttttaagtttaggtgacaccttcttatcacattggacttcggattcaagcctccatttcatcccctgcaccaatacggtgagtgacatactcctcaatctctctatttccctggataataaacctaagatacttgaaacttcgtctcttatggatgacctatgtatcaagcctcacttccacgttcgctgcatgtgtcacatcaatgaacttgcactccaagtgttcagtcttggttctgccgaacctaaaccctttagatattgtctccacacctccaacttagcattaactctattgtgagtctcttcagtcaaaactacatcatccacaaataacatacaccatgacacctcaccttgactcaatatatccatcaccaaggcaggtaaaaacggtctaagggttgatccctagtgcaaccccatcaaaacaagaaagtgatccaaatctcctctcactgtccttactcgagtcttagctccatcgtacatgttcttaattgacctaggtcctagtgtacgacataggtacacatctagcctccaagcacctccatagaacctccatgtgtaagtccttcctctccctatactgctccacactctccttacgagatgaatgacttttgtagtctgagtgtcctagcataaatctgaactggttctcggaaatagtcactaccctcctcaccctcatctccaccaccctttccgaaaccttcatagtgtggcttagcaacttgatgccctatagttgcaattttgaatgctaccattgttcttgtacaatagaaccatcatactccatctgcatgcttcaggcatctttgccgtcttaaaagtgaaattaaacaactcagtcaatttctatgcatgaagtaaattgaatcatcagatttgaacttctggtaaatgaagctttacaaagaagagaagagaagagatttttattatccgagccataatgaattacctcgcactaatatatttatagagcctatgtaagtgttcttctgagttctaaccacctccctgaccaacacccatgccagtcacatgacccttttaactatctttaacaaatcaactatcgctatacagaagatatctacttaattcaattgcatttaaaaacatgttctcttagtatgctggtttgagatgaatttatttgttgagtagttggggagaattattcatttgtttttatttggtttgctggcaggtctttaagcattactttgaagagctagaagaggaatccctacgagataattttgttgtagtggtacaagggacattttctttctttttgaaaaaaaaagtatgtggccggaaaagaatcattaagtactggctgtgactgaaattatgttgtcttgtgcagtatgaattacttgatgaaatgatggactttggttatcctcaatatactgaagcaaaaattctcagtgagtttataaaaactgatgcatatagaatggaggttacacaaaggcctccaatggcagttacaaatgctgtgtcctggcgcagtgaagggatccaatacaagaagaatgaagtaagttttatgttttatttaatagacagcttcttttagtggcctatatttaattttgtttttctttcaggtatttttggatgttgtggagagtgttaatatacttgttaatagcaatgggcaaatagtgaggtcagatgttgtcggtgcattgaagatgcggacatacttgaggtttgcacttctcctagatatagctgtatttatgtatgtatgtgtcactctttgcatattcgtacttgtatccgtaaaagtgaaatgtcagtgtatgattccctagcatgagtgggtgataaatatctatttcatgtctataggtggtaaaggatttttgactttatccttgtcatggtaataaaaaaatcagatttgtattcaatctttatccaagcgagccccaaaaagttctatcatcaattgcttacttttctccctaagaatcaccccaaaaaaatcaagtttcgtactggcttcttctcgccatcataacctgcagtgttctagggtgtattcggcatggagaatgttttggaattttctcatgtttggttggccaacttttttagaaaacattttctcttggaaaacaagttccttaaaattgaaaaattggtgaggcagtagtctggactatcaatactcttaaggtggaagtattggttttaaaagaacttttgcactgttttttcttgaaatgcgtgttgttgatttcctataagacaaatagcactaagatagtgttgagattacatccaaattctgagcaagaaagggtaggggagaaaaaattgcgttaaaataataatgaaaaccccatggaagaactgaagtatacaaaagtttctatcacctaatggtaccttctctctcaaaaaaaagtttctatcatctgtagcaggggttcaacatcatctatctactccaatttacaacaaaaagaaatcaaaagtagatagtccatcttggtcttcagaatggagttgttgcagacttcaaaacatttattgttcctttctctcctaatgcaccaccaaatatgggcaggtatagttttccgtgccttcttcaatctcttaaataggtactttttatgccaatggaacatcaaatcagagttcgacactggcatgacctattcaaggcctaaataatatagaacatctaccatatctgtaaagtgaaagaacagtgaaggaaatgatggttactagattcttcttccttttcacacaaataacatctatttactagttggatgcccctcctttgtagattatcttggaatgaagcagcttctcttttcactaaccacacaaagcacattacttgcactggtgctttggagttccacacctgcttccatgggccatgtgtgtattggttcctgataagcaaagagtaacgggacttcactgtgaaacgaccatgtcgttgccccttccatatcaagctatcctcactgttgttaagctttttaaatgaagtcagaagaccaacaacttctacagaactctccttttccctttcatttggattccctcttagaagtatgttccagttctctccttcttttctttgtgcttcagtgaggtttgtatctcgtgctatactaaaacagataggaaattgatctttgagaggggaatgccgaatcttggtgtccttccagaaagatactttactgccattgcccactttgattccaatgttagctgagaaagcatgccatagatccctgatatttctccagatacctactccttgtggtggacatcccatattagaggaccattcattcaggaggtcatatttctctgttgtacttttcctccagaaagaagtcccttcaaagttgaatctccatagacatttcattaagagacatatattctgcacccttaaattcttgatacctagtcctcctctctttcttcagaatcacaatgtcccacctgaccaagtttaaggtcttgcttgccttattaacttgctgaaagaaatctcttctcaatctgtctaaccttttctccaccttcagaggcattgaaaaccaaaacatagccatagcgtatgtgggcatgaaatccaaatcactattaattagaatcaagtgacctccaaaagaaaggtattgattcttccaatcagagagagcctttaattcacacctctcagtcacacattgccaaatagaatatgatttaagttttacccctaaaggtaagcccaaataaatagtaggaaggctatcagtattgcagcccaaaactgttgctagaacctgtaaattctaaactttagtaactgggaaaagtctacttttcgaccaattgatgtgcaacctgatacaactttaaagactttcaggatcaatctcatgtaattaagttgcctcacctcaaaagattatggtattatcagcatataaaagatgtgagagagacaggtagttgtgtgacccactgcttactttgagacctctgatacaactctggtttacaggaaagttaagcaatttgcttatgtgaagcgtcaccagcaagaacaaaaatggaaaaaattggatcaccttgcccaatacccttttgagtagtaaagccattctgtggagatccattaatgagaactgaggatctgactgtgctgatgcagtaccaaatccccatttttgttcttgctagcaaataaactctgtggagagccattaatgagaactgagaatctgattgtgctgatgtagtaccaaatccattgtgccgcttcctatcaaaccccatgtctttaagtatgtctaaaaggaaaccccaattaacaggattgtataccttctcaatgtcgagcacatgatacctttacttttctccctttgtgtggaatcaatgcattcatttgcaataagtgccgcatccataatctgtctccctttcaaaaaggccatctgagagttggaaattagcttgggcacaactcttttcaacctttctgtgagcaattttcagtttttattggacataatgaaattaggactcccctgaattacaaatgaaggcaactatccaccaatcatttcttgaaagccttctttctcgagccaccaattttcaaatttgaagtacatattgttccttcccatttccctcattgtaaaagtgaggtgtataatcagaaataatttttggcaaggttagctgcttcatagaattaaacaactgttctctcttaattgtatttagcttatataattgttaaaagtaaacttcaatcaaagaaaattcctatcattactataggtggaaaaagtgagaactttggagctgattttgagcttagaacatcagttggggacagtgaaaacaggtaggtacagttaatgttataaggtgcagagcaactgtacatgtatagccaacatatacggctttgccaacagacttttggccattaatgtgttagatggagtataattttcttaacacaaagggtagcggctgcgggtttcccttgtcataaaaaataaaataaaaaattcttaacacaaagggcttgaccctgttatatataagattgatgattgtaagaactctgttaactatagggacatttgtagtggttctcgtttatgacattatacgtcagaagtgttaacttcagtaagagttgagattggtgccccttttctgaagattaaaacagtttgttcagaaaccaagataaagcctaaaagaaaccaagataaagcctaaaacctctgggatgtttctaaatatagtgtcctgtctgatcttaaatatttttttatatgctttgaactatttctagcagcgtgaaaatgttctatactgattatgattctgtcatcactaaggtcatatttacatgtacgttgcaaccttgttctccgagacttccacttaagatttacacagttgagttaatggagttctttcttgctgcatttcctcatatttctaatgagctgcctcaatagtagcatcactagtgcatgtctatgaaaacatctaggatttaaatgttgactcaaggactgcataccttttgatctctgtcacacccctttttgcgcacaggcggtgaggattttttcaatttaagtgacggtattgatttagaaattattttatattttttagagtcgccacttggaattgagttatggtgttccaagtcacctttttgtttaatccctaatcaaaaggaaatgactctttgtttggtctgcgaaccagaaaatcaggtaagaaattctgttaaccgaggggaagatattaggcatgcctcgagtcccgtgattctaacacgatcgcttttattgacttatacttatcttgataaatttttggataatttgtgtctatatgccaaaatttgcttattttttaattattgaatttttattagtcttaaaccggatgcataaatgcattcttgatcttgacattttgagacataacagtcttcccctctcgagtttatcacacttaataatttcaatttacacctcttggtttgaattaacaaaaataattattaaaacaatttggacaaggtgcgtcactgcatccttgagttttttttaagtgttccaaagaaagatgtttaaccacattcttaattgaaaccgacctttgaaacgggtcatatattttaatattttacctattactagacagcttaagcattttattagtgattaaattacattttttctatttattcatgaatactatttaaataataaaagtctaaaatcttaaacaaatagaaagttatttcatattctaattcgatatagatgcatttacatttttagtattcttacaagctatgacaaaagacataaaaaaaaatgtaactcttcatctcctaatttttctaaaataaacattttttaattttagataaatttgactaaacaaactattagattaattctgtcaggcatttagctaaatataaaaaaaacacttaattgatagtagcatattgtacaagatggaagataacatagactaaaataatgggtaagtatttcaatattatagcatcaaagttcaacacacaaaatttaagcaacttcataacattggaatcaaatctaatataatcatgaaaatcaaattatacaataaaaattaaatggtaccttttgtgagaatcaattcacgaaaagaaaataatttgaataaggaaccacgaaagcaagcctcaaactcaaacctttgtttgtgtagtgtgaaagaaaaataaatgtttgttttttgtacgtatgttggtttgggtgggtgtgtgctgattgtattgtgtatatatatacactatatatgtgttgtagtattggaagtgaggggaatgggttttttcttttttcttcttttttttcctatacatgtgtgtttttcctttgctgatttgtttttctttttctcctctgtattgctgatagttgtgtgtgtatgtattcaatgtgttttagtatataggtgtgtagtgtgtgattttctgatggtttgtgtggggggtgtttagtggtgtgagtgggtagtgggataggtgtaagtggggttgaaaggtgaagtggggtagtgtgggtagtttaggttattattatttttagcttaaatatatatataaaaaccataataataaaaataataattaattattttgaattaataaaatatatgaaaagtcaaatagctagtctaaaaaatataattaagaaacactagcttatttattaaatctaaattaaaagaaaatacattgtttttttttgttattttcaaatctttttaaaataaacttactaaattaaggtaaaagtcaacatatttaatttagatttttataaaatatttaagctctagaaatggtgtaagaccttaagttcggtcaaaaattacgtgtctacagtttgtctctcgaagggttttcagacaaagaagtagataacgtgacaagttttgaccggacttgtatttgaaggaaaaatctgtgtaaccaagtcttggttttggacatcctacatattccgggttataagggaatcaggtcacatgtagttcaaggagatgagttgatgagtttgaagttaagtgaggtttcatcgaggctccaagtcgcggttcctatccttacataaaaataatgaaagctaatagtcaaaaggaaaataaaaagtacaagctcctatctatacaacttctcttgagtcttcacttgtgtctttacttcagatatcaccttgatttttgggtgagtatcttgatcttgaattggattgaggcttaacttgccgcttagagtgagcttttgacacttttcaaaaatgaaaatttgaatatgttcttgaatgactacatgttttcttgatcagaagctaaatagaaatagatgtcaggaagtcaggctactacatgcattgaaaaagttgattctggctatcatgggattgatcattttgaaaaaagttgaaattttgttcttgaatttcaaatccatgttttgcttgaagaaacctgaaaaccatcacaaacaaaagaaataaacagtttaggaagtgcttatcctaggagaaaaataaatattaacagtctcagactaggaagtgtttatcctaggagaaagtaaccaaatcccattatgtaggagggtcctactaatcttattgttcagaagggtcctgttaatctaaatctcattgttcaggtgggtcctgctacattaatttccattgtttaggagggtcctgttacactaattctcaatgtttaagagggtcctgctacactaatctcattgtttaggagggtcctgctacgctaattctcattgtttatgaggatcctgctactctacttcccattgtttaggagggtccttactctagttcccatgtttaggagggtcctgctactctagttcccatgtttaggagggtcctgctactctaattctcattgtttaggagcgtcttgctacgataattcccattgtttaagagggtcctgctacgataatttccattgtttaggagggtcctgctatgctaattctcattgtttaggaaggtcctactacgcttattcccattgtttaggagggtcctgctactctaattctcattgtttaggagggtcctactactttacttcccattgtttaggagggttctgctattctaatttcattgtttaggagggtactgctatgctacttcccattgtttaggaatgtcctgctacgctaattcccattgtttaggagggccctgttacgctaatttcctttgtttaggagggtcttgctactctaattctcattgtttaggagggtcctactactttacttcccattgtttaggagggttctgctattctaatttcattgtttaggagggtactgctatgctacttcccattgtttaggaatgtcctgctacgctaattcccattgtttaggagggtcatgctacgctaattctcattgtttaggaggtcctgctactctacttcccattgtttaggaggatcctgctactctactttccattattttggagggtcctgctactctaattcccacgtttaggaggggcctgctactctaattcccattgtttaagagggtcctgttacgctaattctcattgtttaggagggtcctgctacactaattctcattgtttaggagggtcctgctaaactaaatcatcaaatacaattaccataacatttttttaaatttttagtttttttttaaaaaaaatttagattagaaaatgtttatcctaaaagaaaaatgaaaaataactgtcttaaactagaaaatgtttattctaggatagagaaagaagaaaaataataataataacggtctgcgactaggaagtgcttattctaggagaaaaatgagaaataaatgtctcaatctaggaaatgtttatcctaggagaaaaaatgcatgtaattttttttttgcaataatgtttacaaatttgattcttcattttttttttttttaaatggcggtcgatttgtggcattggctttgaggataattgttcttgttgttgccatgttggaagctaatttcagcttgagatagactgctttggtccgctagtcagctcaccttcataatcttaaaaacatgtctagttgttcagaacttcaaacttcagatttgtcatattgtatctaccctccaataatcattgaatcttgtattcatataaattctcaaaatttgtcacttgttgacaagttactatgcatgtcactatttcttgaatcatgtcacatttgatgtgctgaccaaactttgttttgtgcaattgaaaatatggtagcaattttgaaatcattttctgcgtgtttttatgaagaccaacttaagaaagaaatgcaaaccgaattgagctatacaaaataataataaaaaatatatatatatttgttccttctgagagaaaatgaaaataaaaagggactcatttgagagtgatgctcaattctaatgatcatgacatgcatgtgagattaaatgatttgatctatccaattaatctaaactttttctttgtcaaactttcagccttttgaagtcatgcttttataatccaatttgtgtactacattcatgtctcacattcgacttgtggttgccttcgaaaggtttttcaccaacaatctcactcattttgtatgtctcttataatccaatttcgtgtactagattccatggttctcacattcgacttgtggtgcctcgaaaggtttttcaccaacaatctcactcattttgtatgtgtctctctcaccgccgtcttatagtgccctgagggttttcaccaataagactctcattttctactttctctcaacacaaatgatgccttatagtgctttggaggacatttttcactaagattctctcatttttcactcctcatacgaaggacatggcctttttccttatatgataatcaacactgaaagcttgcttgacttgtcattgttaaaaattgatcagaaggtctttatttggattgtaacgtgacttttggaaaggggttacaaagaaaggattggcatgaaggctcaaagataatgcggtaacagggttaagacttacaacttttggaatcgactctattttgcataagcataagcataaaaataataattattattattattattatttttgcctcagtttttgtgatgaggaccttttaaatttcttttcttggttagaccgaaccttaaaataaggcttcctacgtatcttgtcaaagcaagaatcaagtcaaacgtagttcagacagtttgttcttttgttgttattgatatttttttcaacctttttttattctttttgtgaatttttttccttttttttgttttgaatttctgactcttctttttctttttgactgtattttgattccaaaggagggttatggaagagaataaatttaaggctcaaaaggggtagcaaaggattacacggtgtttggatagtagaatgaaatgtcttggtcatatcaattattaataatgacaaatacaagcatgccctttaagatgtgaagtgaaaatcatacattatctctttgcaacgtatgcattgatggatatgtatatcagttttgttccatatttgtcagcttgaaatctctatttgagttaaccttcttgacaaaaaatgacatacgtcaatttaaatgaaatttattcttttaaccattttcgatactaaaggacgtatcaaggtgtttaagtcgtttattcatttcctcgaatgtatttattttttgatttctatggtgtattcattccatggctagatataatcttaagatcttaccaaatcatcttgcatatcatgtcacaaaaattgaattgaaaagagatgtataagtggaaagccaaattgaacgggtcactttgacacaaaataaagattatattaagataaaaaaaagacttgatgacaagataacaaactaaattttaggttacaattctataataaccaaaactacgacaagacttaacaaacaaacacataagagaaatgatagaaatgtctgacttactaaaataaaataaaaagaattgcatagcagaaatgatgacaaaataaactatccatactcttttttgagagaaaagaagagtgtatcccaatcaccaagcttgacttcttagccactactttgcacgctagccttcatgaaagctccaacaatttcaattgtctttttctgagaattgagagaattgtcatattctttgtcattacatatcatctcgatgaagtgtacatcattatgcgccagtagaggattcttagtaacatttggggggtcatcattttgaaccacaatcatctttgtttgaatcatctcttccacctttcttcttaaatttcgacaatcttcagtactgtgccctggagcatcagaatggtatgcacaccgtattgttggattgaaaccttttggatgtggatccatataattttgaggaattgactctatcatattcaaacgtttcaatttctcaaatacacttgtgtaagactctccaattgatgtaaaattgttctcaagtctttgacctccttcaaatccctgtcttggacggggattataaggtgctcaaaatttttgagaagaaggacgaacattttgatttgttggcgctctccattgaggatagtttggtggatatgcatatggttgtgcaccatagactgcatattgaggtgagacaatagagtattgtgtatcttgcatggggagatagggatggaattgaggtggtgcatattgataaagtggacctcttggatttttttgtgtgtctgacacaacatttgctacattctccttcattttctttccttcaagatttcctgatccatttttaatcacctgtgttgtggctttcaaggcagcttgacttacaattttttcagacttgatgccattctccaccatttcaccaatcttaataacttcagcgaatgtttttccaacaacggaaagtaaataatgaaaatagtttggttattgcacttggaggaaaacatcaatcatttcagactctttcattgacagcttaaccctagcagcttactccctccacctaatagcatattcacgaaaattttcggtattctttttcctcatgttggcaagtgaagtacgatctgggactatgtcaatgttatattgaaattgttgaacaaatcatctcatgtatgccagttagaagtatctgatctatgaaccattctgaggcaattcccatcaaactttccccaaaataagtcatgagcaattcttctttgcttccggccctctcagttgattacaatatctctttaaatgaactacatgatctccatgtccatcatatttttcgaactttggagttttaaaaccgatgggtagatgaatgtggggaaacatgcacaaatcattgaatgaaacacttttgtgacctcccaatccttgcatatctcttacactctgttccaaacacttcatttttctagccatttcttcatgttcctcgtttttaacagttttttcagtttcaacatgggaactatactgatgagtgtgagggtaagagcttggaattttaagagcctgttcagaggtgtagccatgatcacgaggaactttggatggaggatcattgttggatttgggcaccattattggctgtgtgacattattagtcggtgcagttggcacgaagaggggatttctcatcataggtgtactcaaagggcccaccgtagaagttccagctacgttggatgtgttagcgtagggatcgaatccaggtggataaatcgaatcacctatcgacacttggataaggggtgacatatttgtatttagatagtcacggatcgaagacggtggagcttgtccactcatccaagcttcgtacatctctatcatttgttgtcttaatatccttacctcttctattgacacggtttcttgtgagaccatctggttttggacctcatcattgtccgactaattttcgtctttgtgagtcattttctttttttcttttgaccttgtattgtaggtatggaatgtcagcttaaccacaaaccaaccaccttacgttaactctatgcatgaataataaagtttgtttgggttagtcatttcttaattattagttgttgttggttcttttaaaaaaaaatgatttaataatgcattgatcaaatccgtttgggattgcgtacgtcacatgcttgagaaaatgattaagatctttgcataatttatttctaaaactcaataactagacttttttttagagttttgaggtaaaatcctttagtttttttttttgaattattaaaagaaaattaagaaaaacttatttttgataaagattaaaacttcttgttttttcattttttttttgaatttttgaaatatggattttatttttatttttgaataaagatcaccgaacccaaaaaggattgcctacgtatctcattggggtgagaatcaggtgtgcgtagttcgttcagtttggacagttaaaaattttaagatattaaaactttttttttttgacaaatgcattattattcaagactaaactaatacatttttcatgtaactcataaaaagatctaagtggtcaagtaagagatgaatacttgtcctagacggactcaattcttatatcaagtcactaagtcaaatacaaattatgcaaatgagtggagcctactagtgataaccatgacctaaaggagattgatgtctagactggcttactcaagtggacaactcgagtcaggaagggacaacttatcgataacagcgctatttcgacttcattactgatccaaccccgcctaagatatgtgactaaatatccttcactgggtgtcaagacactccagctttatctcaagggaaaataggatgcataactgcattcctgtgaacgtgtgtgaagtgtttttttttagactaagaaaaggtgcgtgaaagaagacaatatataatataatttaacaatatcaaagcaataaatgagcaataagtagcatattaggccgtcataaacaatatatctcaaaaaataataataagatcaagtaaaagtcaatataataaagctcgaattctggttatttcccagcgcagtcgccagagatgtcacacccctttttgcgcacgggcgttgagagattttccaatttaagtgacggtattgatttatgaattattttatatttttcagagtcgccacttggaattgagttatgatgttccaagtcacttttttgtttaatccctaatcaaaaggaaatgactctttgtttggtctgcgaaccagaaaatcaggtaaggaattctgttgaccgaggggaaggtattaggcatccctcgagtcccgtggttctagcacggtcactttttattgacttatacttatcttgatacacttttggataatttgtatctatatgccaaaatttgcttattttttaattgttgaattttcattagtcttaaaccggatgcataactgcattctcgatcttgacatttggagacataacagtcttcccctcttgagttcatcacacttaataatttcaatttacacctcttggtttgaatttacaaaaaataattattaaaacaatttggacaaggtgcgtcactgcatccttgagtttcttttaagtgttccaaagaaagatgtgtaatcacattcttaattgaaatcgacctttgaaacgggtcatatattttaataatttacctattactagataacttaagcattttattagtgattaaattatatttttactaatttgttcatgaatactattgaaataataaaagtctaaaatcttaaacaaatagaaaattatttcatattacaaattcgatatagatgcatttacatttttagtattcttacaagctatgacaaaagacataaaaaaaaatgtaactcttcatctcttaatttttctaaaataaacagtttttaattttagataaatttgactaaacaaactattagaataattctttcaggcatttagctgaatataaaaaacacttaattgatagtagcatattgtacaagatggaagatagcatagactataataatgggtaagtatttcaatattataagcatcaaagttcaacacacaaatttaagcaacttcataacattggaatcaaatctaatataatcatgaaaatcaaattatacaataaaaattaaatggtaccttttgtgagaatcaattcacgaaaagaaaataatatgaataaggaaccacgaaagcaagcctcaaactcaacctttgtttgtgtagtgtgaaagaaaaataaatgttttttgtacgtatgttggtttgggtggatgtgtgctgattgtattgtgtatatatatacactatatatgtgttgtagtattggaagtggggggaatgggtttttccttttttcttcttttttttcctggtacgtgttgtgtgtttttcctttgctgatttttttttctttttctcctctgtattgctgatagttgtgtgcgtatgtattcaatgtgttttagtatattggtgtgtagtgtgtgattttctgatggtttgtgtgggggtgtttagtggtgtgagtgggtagtgggataggtgtaagtggggttgcaaggtgaagtggggtagtgtgggtagtttaggttattattatttttagcttaaatatatatataaaaaccataataataaaaatattaattaattattttgaattaataaaatatatgaaaagtcaaatagctagtctaaaaatataattaataaacactagcttatttattaaatctaaattaaaagaaaatagatagtttttttttgttaatttcaaatctttttaaaataaacttactaaaataaggtaaaagtcaacatatttaatttagatttttataaaatatttaagctctagaaatggtgtaagaccttaagttcggtcaaaaattacgtgtctacaatctcccataaggttttcattagtttaaatgcaatccaattcctgctaaatgtaaaccagttgcaaaatggcaccacgtcacttttctttagtcaattttgagatcttgttctttacccaaccgtttaatcgagtggtaccagtctgaagccataatgtttttctcttgcagtggtatgccggagtgtaagcttggtctgaatgatagagtattgctggaagcacaaggacgtaatgctaaggggaaggctattgatctagatgatatcaagtttcatcagtatgtgattcaaccatatcttttgttgtgtgttataacatctttttgcatatattctttatgcaagaattggcccaatgtgggtgtgggagtagggggacaaatcatgataatttgggaaatgtagtataatcttttaaaacttccgatagagtaagcaagtggggggagagtgggtggtcctcagtttttaattggaaaatccttgctgccctttttaaaatgaaaaaatctgaaggcttttctataatataacttgaccacgttcaagttgtaacccatttctctcccactcaaccaatctccctcccccctcacttacatcctattctgcccgtctctcattctataacttctactttaacttaggtgtgtgcgtttggcccgatttgagaatgatcgtactatatcattcatacctcctgatggggctttcgaagttatgacctacagactcagtacacaggtacaataatgttttggtgctctctatctgactgaaatctttttagtcccttcattgatccaataggttaaaacgtgagtactacttactctcaggtaaagcctcttgtgtgggtagaagcccaagtggaaagacattctaagagccgtgtggaaattctggttaaagcacgaagccagttcaaggagagaaggtatgtccatttgtactatgctacacacctaattgtagctgcatcatttaatgtgtagcattatgatattacaatgtgttgctggttaagttttgagtttatttgacaatttcagcactgcaactaacgttgaaattgagttgcccgttccaactgatgcaactaatccagatgttcgtacatcaatgggatcatctacttatgcacctgaaaaggatgcattgatttggaagataaaatcttttccaggtggtaaggtaagcgtgcgcttagtcatagctgaaggtttaactcagttattttttgccgtttgttctctcactgagatctcttttatgctaattcttatttcattttcaggaatatatgttgagagcagagtttaaacttcccagcattacagcagaagaagcagttcctgaaagaaaagctcctatacgtgtgaaatttgagataccatattttacagtttcgggtatacaggtgagtcctaaatagctgtagttcagttggattattcagtattttctttttgtcaaattcctacagcactctagttatacatgtccacatttagtccatcgtattgagaaaccattatgagttgaggattcaatgcattaagagaaaattaatttagaaattaactactaatttctgcctgctggaaaaaaaaaagaactgaaaaaggtaatacaattaaattaataaactggaaaaataagaacaagaagagtctgctgaagaagaaaacaataagagggaaaaagctgaaaaaactgaaaaagagtgaagggtttgcccccaaggcctagctcaagtggcaaaaggtggaggatttgtggcttaggtcgcaggttcaagccccacaccatgcaaagcgaagcccggtatttaagtggannnnnnnnnnnnnnnnnnnnnnnnnnnnnnnnnnnnnnnnnnnnnnnnnnnnnnnnnnnnnnnnnnnnnnnnnnnnnnnnnnnnnnnnnnnnnnnnnnnnnnnnnnnnnnnnnnnnnnnnnnnnnnnnnnnnnnnnnnnnnnnnnnnnnnnnnnnnnnnnnnnnnnnnnnnnnnnnnnnnnnnnnnnnnnnnnnnnnnnnnnnnnnnnnnnnnnnnnnnnnnnnnnnnnnnnnnnnnnnnnnnnnnnnnnnnnnnnnnnnnnnnnnnnnnnnnnnnnnnnnnnnnnnnnnnnnnnnnnnnnnnnnnnnnnnnnnnnnnnnnnnnnnnnnnnnnnnnnnnnnnnnnnnnnnnnnnnnnnnnnnnnnnnnnnnnnnnnnnnnnnnnnnnnnnnnnnnnnnnnnnnnnnnnnnnnnnnnnnnnnnnnnnnnnnnnnnnnnnnnnnnnnnnnnnnntggagaagggtagaggggcgggcccattatccaccgagtttagaaggctgtgattggtccaaagggcgggtcacagacgggtttctctgttatcaaaaaaaaaaaaactgaaaaagagtaaataggtaggagaagccaaagagtaacaagctgaagaaaaaaaaaacggaggatgtgagttcagcagcacagggaagaaagacagaaagaatgggggaaaaaatccagcaggaggacaccttcaccaactcagcagaaaagggccaaataattccactttgaaatagttcaaggggtcataggttgcccgcaaagttgaagtgttctttgggattaactggacaagtccaggggaaaaagtgtattatccctatttattatccttgagagggagcatggtttggaggcaggtagtagtacaagttgataagctgaggaactctaaatgagttttgataaagtgacgtatgaggtgatgaagtcaacagaaccaacttaaatgtgtaggcctgattgtccccgcatcctaaagaagagaaccaaacaagtctttgtgagtcttaacttaactcttgaacttagtattgaacgtttctgtctaatcttgttcttctggttggtgacggaaaacgtgatacaatatcatgccttttatgacctttattgtgggcttagtttggcgaacttaccgcatcgacagcctaaatgtaattttgttttttagcttgaactgcttatttgcaaaagttgtgaccaatgtggatcctctaatgcatgctaggttcgctacttgaagataattgaaaaaagtggttatcaggctcttccttgggtgcgatatattaccatggctggtgaatatgagttgagacttacgtaaaaccacaccgagatgatgatccaatccaattaagtttgcccgaggctcggataagtcacaagttccaatgctttgagctgctttgcaggagatgaactggtttagctcatagatttgaagcaaattgttttgttgtgccaatttttgttatttatttgactttattgcttgtatgctacattttcttgtataaagatgtctgctgattaagttcatgttccatatactgttaaaaaaaaacggcttcaatgctgcatatttgcttaaacccaagagtcacgactgctggtgcatgctggtcgtttgtatggttttttctgttttccggagatggattatgatgatggctgtaataactaggtaatttgtgaaatggaagacgtatttggtaca

SEQ ID NO: 33 - DNA, 5914 bp, Vitis vinifera
  source 1..5914: mol_type = genomic DNA
  misc_feature 763..862: note = n is a, c, g, or t
atggcgggggccgcctcggcactcttccttctcgacatcaaaggccgcgttctggtgtggcgcgattacaggggcgatgtctctgctgttcaagccgagcgcttcttcgccaagctcatggagaaagaggtccggtcctctacttttcatacgatcttttgtttatttattctatctgttgataatctatagatcggttttgatgatttattgagatttatgtatggttgtcgagaaaatggaggaaaagataataatttaaaacttttaatctttggctttcattatttggaacacttggaccgaaagacctcccctaataaaaattattgcaaccaacaaattcaatttccatacctatttaggtcatatgttctttgttttcctttatgtccatgagctctttccaatttccataactatttaggtcatattttgacataattctttgattttaatggttcttgatttgtacttttcgaaaataaattttctaattcttacttattcagttcccgattcaatccatatagcaaaatttgagttcatttagcttgggtttgaacaaaaattattgtaaatctcagttccagatgaattttctttcttgatccatgttgtgcatttgtatctcggggcctatgcgatgccaatgcggcgcccgacatttttggctctggtgcctaggcttgagccaatgcggtgccctgagtgtcctcgctaattcaagaatatggtactttttggtttgcaaaaaatattnnnnnnnnnnnnnnnnnnnnnnnnnnnnnnnnnnnnnnnnnnnnnnnnnnnnnnnnnnnnnnnnnnnnnnnnnnnnnnnnnnnnnnnnnnnnnnnnnnnncttattcccagatattttatagaaaagatctcttttaaaattaaagtttttataaatattataattatttgtattttagaaaaggcatttttaaagtgcaactcccaatgtaaaaatgcaatactgtatcatagcaagtacttttacgactttgcttttttccacttaaggtaaaatgcgatagtacatgaacatggttgacaagcaaactgaatacaagaatatattattgctcgttaatctcccaatttcatattggttactccgcattggctcaagcctaggcaccagagccaaaaatctcaggcaccgcattggcatcgcctaggccccgagatacaaatgcacaacaatcccacttttatatgcttggtaaatttcgctttgatatgcttttctgttatatcaacaatattagcttactcagcgaatagcttttggaagtgtgcaaattcatggttgatttggtcttatcatttgcttcagggtgatccagagtctcaagatcctgttgtgtatgataatggtgttacatacatgtttatacaacacaataatgttttcctaatgaccgcatcaaggcagaactgcaatgctgccagccacctcctctttctacaccgtgttgttgatgtaagcgctattggtaattatagttttatacctcggctactgtggttttggatataatcaattccaacaaaatttgaaaatgagatgttttctattctccagtggctatgtgatttgatattttttattttataacctttttgaattctttgaaaaagggatttgaattccttacattgatccattttttggttgcaggtctttaagcattattttgaagagttagaagaggaatcacttagggataattttgtggtagtggtaagaggacgtctcaatctgcccttttactggtctttatataactttattcattggtgaattttattaatgctatatgatagtaataaacaatttgatcctcctttttttggatgcttggattgtctctcatttggtgcctttaataaattcgttttatgcgtaaaagaaagcttaatgaaaaattctatgaaattatactgatgctttgtgcttttcttagtatgagttgcttgatgagatgatggactttggttaccctcagtatactgaagcaaagattctgagtgaatttatcaagactgatgcttataggatggaagtttcccagaggcctcccatggctgtaacaaatgcggtgtcttggcgcagtgaagggatacgttacaagaagaatgaagtaggtcaatttttatatgagttatatattcatgttttaaaccactgtataataaagctttggtttttgttggtcaggtattcttggatgtggtggaaagtgttaatatacttgtaaacagcaatgggcaaataattagatcggatgttgttggagcattgaagatgagaacatatttgaggtgtgttatccaactgcttgtagaaattgtgtagtgttattcaatgcctagcaagggtaaagagatgaattttgactatcaaaattacaagctaatatttaccatgtaaaaccaatgtgcataaacaaattgagaatcaaagggaaacttatgttgtgtggtttgttctccagtaaaaaaaggggctatcctgacctgtgcattcagaaaatctagtgtctgcaagctgaacttttacaccattattttcaatctgaaacaaaatcagactttaattaatgttgaaacatatttttgttgattttgttttatcacatcaagtattaaaacttaggattaagtagattaaacatatctggtaaaatgacttaatattctaacttaaaattaaaagtaactttaagtatgaagtcaaaatagttaacatactcttaatctcaatttttttttgcctcatttgcccacatctaatgagagtatatttcacagtcatgactctacatccatgactcatttttataataaggtattagttaatttgatgataactattagttaaaactaataaggtaaatatgttaatttgatgatttagaataaattttaagttcactttattaagcaatcttaatacttaaagtaaaaatcaagtaataaattttaagtcatcaacttcagaataatttaatttaaagtcaatttaaatcattaagtattaagtattacatttttactaaataccctcttagttttgaaagttagaaactgaactattcccaaataaatgcaaaattttaatctgctaaattccaaattacttatgctggtaagataaattagttgaaggcatttaatgttctagctgatgcttgtatttcaaattaaaatattttgcacctattctttgtatgtttgttggcctctcaattttattcgacaaactctggtttcaggagctcattttctttggaactgtaggattgttttgatgtaggatacaatgaggaagttccttttatttaaactatgaagacgtgatgtgcaagagagtgcaaaaaaatatgtgctctatttctcattcatgcatgtggaaacttgtgttcaatttgttgtgtgatggttgtggaagcctgtgcttaatgtgctatgtgatggttgtggaagcctgtgattaatgtgctatgtgaggcttgtgcttaatttgctatgtaacccataatatggtggatgaacccaaccctcatacatacttgcccattccatttttttttatttttttttattttttggcattttacctttagggttttatacttgctcctgcatgctacctggaaactagaaagtattcatactttatctgttgcagtggtatgccagagtgtaagcttgggctaaacgacagagtattgttggaggcacaaggtcgatcaacaaaaggaaaagccattgatctggatgacatcaagttccaccagtatgtagtcaaacttttttgtgtagttgtaatctgctgctggtaattaatttttattttttttctgataattatcatgtgcaaaactgcaagggctgatttattgcaaactttctattcttactgcaagatctcaaactaaatgtgcttatttttgttttagatgtgttcgtttggctcgatttgagaatgatcgaacaatatcctttattcctccagatggatcttttgatctcatgacatataggctcagtactcaggttcagcttgtgcggtttctcatgctatgattttccattgtgtatcatatgccatgtgttaaggtttattatttttgctcttaggtaaaacctctgatatgggtggaagctcaagttgaaaggcattcaagaagtcgtatcgagatcatggtcaaagcacggagccagttcaaggagcgtaggtatatttctttaggtcttggctactgatctctatctagtctagcacccttggtcagggtaatgcttagcattacctgagttgacccatgaattgacccatgagttgatttaattttgcagcactgcaacaaatgttgaaattgaattgcctgtaccatctgatgctaccaatccaaatattcgaacatcaatgggatctgctgcatatgcacctgagaatgatgcattactctggaagataaagtcttttcctggtggcaaggtataagttagtgtttaaattgcttcttctgcccataaattgtctaatgttatttttctgttgatagctattgattttgaaggattcattatcttgttttctgtgcaattgacttagtttttaattttttggaaattcaaatcttttaggagtatatgttgagggcagagttcagtcttcccagtataacagctgaagaaggagctcctgagagaaaagctcccatacgtgtgaagtttgagataccatattttactgtttctggaatacaggtatgtgcttgcacacatgattgattgctctgttaaattgagcattttgataatattcttctgataccatattctgtgtcctctctctctctctgagaagtaacactctgcctagtcaatgcttgaaaattttgtttgctaaatttttttaattgttcggttaaattttcatttggttcagttgctatgaaatatagttttgcttgcaattttattaggccaatcaattatgagttgtagagcagtttgctaagtgcttgtttggatgcatttcttgttttttgtttttaaaattagaaaatggtagtaactttcatataaaatgcaaatactcttagacgcttatactgaagtaatagatttaaaaactgttatatataaatgaggtatcaaaaaacttttactgtctcaaaatttaaaatttctgaaagtaatttcctagttctgttgtctctctaattcttggagcatcaaaggaactttctatctttgaatgcatgagattgacaaccttatcagttggagcaaaaggagcttggataaatcttttcctgtactctggtgaatgcaggtcacatcatgaatgcttgataattcttcatattaacatattcttaatccattttaaaggttcttgtttcagcagtcctgtatttcgtgacctcataaatgtcaaataatatcaattttattaggactaccttttccctctttaggttgccatatatttaggaaataatatagtaccctatcgaatgagccttctgctgttgtcatctggttccctggtactatgagttgaaattgcataacaaattccgtggttttttgctaaaatcatgattttaggaagtgtttctagtctttctaacatttgaaaatttttatctctcaaatattaaagatgttagaaatactttctaaaatcactgtcaaacacacttttagtaaattgatacaatgactttccgtttatgtttttgctttttctgattgttaaccatctgaatttggggttttgtaggttcgctacctgaagatcattgagaaaagtggttatcaggctctgccttgggtgagatacataactatggctggggagtatgaactaagacttatttaa

SEQ ID NO: 34 - DNA, 4604 bp, Zea mays
  source 1..4604: mol_type = genomic DNA
tgcgtttccaagtccgatacaaaccagcgccgcgccgcgcgagcacgtcgggcgacgttgcggcaggcgagatccgagaacactcctccctcgcgcccccgcacccgcatggccgccgctggccgcagatagggaggcgcaggcgggggcgtgcagatccagatccggtgggcggcgaggacgagatcgccccctaccaccatggcgggcgccgtgtcggcgctcttcctgctggacattaagggccgcgtcctcgtctggcgcgactatcgtggtgatgtctccgcgctccaggccgagcgcttcttcaccaagctcctcgacaaggaggtaagtggccgatcggcctgctcaccttgcctgttgtcttgtctactcctgagatccgtgcggccctagtgctgaattctcgtggaatgggtagggcgactcggaagtccactcgcctgtggtctacgacgacgccggcgtcacgtacatgttcatccagcacaacaatgtcttcctcctcaccgctgctcgccagaactgcaacgcggccagcatcctcctcttcctccaccgtgtcgtagatgtacgtgccctcacccccctgtttgaagtgaatcgttgatgacattgtaccacttgtcgtttatgcgacttgtgcgtgagtacaggtgtttaagcactacttcgaggaactggaagaggagtcgctcagagataacttcgtcgttgtggtaagcaaatttcaagtacttctgtttgatgtgcggttactgggacttgacggaatggggcgcccattttgtgcttacagtatgagttgctggatgagatgatggatttcgggtacccacaatacacggaggcgaagatcctaagtgagttcatcaagacagatgcgtacaggatggaggtcacacagcgtccacccatggccgtgacaaatgctgtgtcatggaggagcgaggggatccgttacaagaagaatgaagtatgttgatttactatttaccttctctctttttagtgcaggcaatcagttctgtgatggcacttgacaaaccaccacacttgtatctacaggtcttcttggatgtagtagagagtgttaacattctagttaacagcaatgggcagattgtgagatcagatgtggttggggcactgaagatgcgaacatatttgaggtgagtttgcattgtcatgtgaccacacaactaaataaatgtgacctataatttaagtccttgtagaatactgttatgcaaacaagtgatcaatttattgttgatctatttttttaatagaaaacagcttgcattgctgtcggcgaatttgttcctgagatctacggattttatgctggattgggatagcataccagggcttttgttactatggcctctctttgttatgatgtagattagtgatcgaaatatatgaaaattttgaattgaaactcgaggatgttacttgtccagtgttactagttccagttatttttcttgctagcttatatgctcaaatctttgttcaggacatttattttgtgattctatttcacttctgtaatacttgtattgataactgggcgtacccagtgccataggcttcccgcactgtgcggggtctggggaagagtatcttgtattgataactggaaatactatatatttgttagcaagttaacaaatgttgaaatcgcaatcaacaatcaccatctaacaataaaatgtcaaaagaatgtttagatgtatttaccagggtgattatactacaggaagttgactagttgtgaggtcaataatttatttgtgttttgccttaaaatattttaatgattttatatccagtattcagatagatatttacttgtcaaaccgtgaagtgagataaacttgaaaggtgcaaaacacatggtgtacgctcataatgtttgtactgtacctaattcttatttgtgtggactgtggtgctacctccgtctccaaaagagtgtcattctcatttttcgaggagtcaatgaatcaaatttgacccaatatatacaaaaagtactgatatttattaggtgtaataagtatcattattaaattatggaatatatttccataattaatcatttaatctatttggatatataaatgttgatgatttttctatgaatagatgttcatttaatatgtttagttaatagatgcatttagtcggaacctagaatgattctctctcaaggacggaggtggtatttagttaatagatgttggttgtgtttctgttttagtatgttgagaatagctggacttggagactcgctgtctaatttgaaaacaagatgtatgcaatgcgagttttctcattttcatttgatgtattcttcatgatattaaaagcgaacctgccaactagggtttttcaactactcattttacgcagccacacttaaattcttctcgcattcagatgtactatacacacatatatatatagggatgaaagtgggtatctgaattgttaggacaatttaatattttaaatagatatgtatgaaatttgatgctaatatgttcttatgttaccaagcacactattacaaataataataaaattttgcataaattgttttatacattatttgctccctacagtaaaaaaggataaatgtatctgtatccgaattttatatctatcatttgagaatatatatgataaatttgaggtttaccatttatgaatctttacaaggtcaatgctaaaaacaagaatatgaatttgcatagcagattctatatcctatttattcacaatcaaagaaaaagaccaaaaaatgatatccgaataagtatctgattttatccctacatctacagccctaacagtgagacattttgaaacagtggaatgcctgagtgcaaactcggcttgaatgatagggttcttttggaggctcaaggcagagcaactaaaggaaaagcgatagaccttgatgatatcaaatttcatcagtaagcaaaaaatatttctcttttcttcaccaaatccgttgcatcactaattcagcatgaccattctcccttctttttaggtgtgtacgtttagctagattcgagaatgatagaactatatcgttcatacctcctgatggatcttttgatctaatgacatacaggcttagcactcaggttctctttctgatcaactgtggaatgctctatagaagatatgaaatgtttccactttatcattttcacatgcatgcctttatttgatgttctttaggtaaaacctcttatctgggtcgaagcacagattgagaaacattctagaagccgtatagaactcatggtgaaggcaaggagtcagttcaaggaaagaaggtgaatgatatttacaaacgcaagatttgcttgtatgacaggaatgtgctttttgaaagaatgggtttcttttttccgtttacagcacagcaacaaatgttgaaattgaagtgcctgttccttcagatgccacaaacccaaatataagaacttcaatgggttctgctgcatatgctcctgagagagatgcaatggtctggaaagtaaaatcattccctggtggcaaggtaattactgtccaattccaaatcaattcctttttccatgtccattgcaattttgaagtgtgctcatgtgctgaagcaatccatcctgtaggaatacatgtgcagagcagaatttagtcttcctagcataacagcggaagaaggggccccagaaaagaaggcaccaatacgagtgaaatttgagataccatatttcaccgtatcaggtattcaggtaatagatttactgttcgaagatatttgtctattgttgtacttcctcatttcaaattataagacgatttagtttttatagatacattacttttactatgtagtgtacatctaagttcatagcaaaagatatgtatctggaaaatccaaaatgtcttataatttagaatggagggagtagcattctatctattgtatattgtatctggaaaagatatgtatctggaatcttcagccactgaatgatgcactatattgcatattgtgcaggtccgttatctgaagataattgaaaagagtggttaccaggcactcccctgggttagatatatcacgatggctggcgaatatgagctgagacttatatgagttttctcttttctggctgatggaagacatttatgaagctgcaagatacatatttgctcgagacagcaaccgtatgacatttgaatgttagcctggacgtcttctgccgaccacacaaggttttccccctgggggcttgttcatcttgttaggctcaccttaccttggttattgtacgttacccatcaagtatagtttttgaaaaaaagagaggataattttaattttcatctctcttgtattattattgatttatttttgtgggtaccaaacttggatttgtttcatctgatcgagttcacaaaaacactgccattactgggtgatggttctgaactgcaggttgaaacaattgtgccctttactgtaaatgtcgtcgtcttgtatccaggcaaaagaaaggaaacctaccgagacctattatgacatc

SEQ ID NO: 35 - DNA, 1287 bp, Beta vulgaris
  source 1..1287: mol_type = genomic DNA
atgtcgggagcggcctctgcgctgttccttttagacataaaaggtagagttctcatatggcgggattatcgcggcgatgtttcagcggttcaagctgagagattcttcactaagttcattgagaaagagggggatccacagtcacaagatccggtcgtgcacgataatggtattacatacatgttcatacaacacaacaatgtgtatctacttattgctgctagacaaaattgcaatgctgctagtcttcttctctttctccaccgtttagttgatgttttcaaacattactttgaagaactagaagaggaatctcttagagataactttgttgtagtgtatgagttacttgacgagattatggatttcggttaccctcagttcactgaagcaaagatccttagtgagtttattaaaactgatgcttatcggatggaagtcacacaaaggcctcccatggctgtaacgaatgcagtttcatggcgtagtgaaggaatagcatacaagaagaatgaagtattcttggatgttgttgagagtgttaatatacttgtaaacagcaatgggcaaataattagatcagatgttgttggggcattgaagatgagaacgtatttaagtgggatgcctgaatgtaaactaggcctgaatgacagagttttactggaggctcaagggcgaactactaaggggaaggctatcgacctggacgatattaaatttcatcagtgtgtgcgtctggctcgttttgaaaatgataggaccatatcatttatacctcctgatggatcctttgatctcatgacatatagactcagtactcaggtgaagcctttagtttgggttgaggcacagattgagagacactcaagaagtcgtattgaaataatggttaaagcaagaagccagtttaaggagcgaagcactgcaacaaatgttgagattgaacttccagtgccagctgatgccaccaatccaaatattcgcacatcaatggggtctgcttcttatgcccctgagaaggatgctttagtttggaagataaaatctttccctggtggcaaggaatacatgttgagggcagagttcagtcttcctagcatcaccagtgatgaggcaactcctgaaagaaaagctcctatacgtgtaaaatttgaaatcccgtatttcacagtttcaggaatccaggttcgttatcttaagatcattgagaagagtggataccaggctctgccatgggtgaggtacataacaatggctggcgagtatgagctgaggctaatgtaa

SEQ ID NO: 36 - DNA, 1287 bp, Brassica napus
  source 1..1287: mol_type = genomic DNA
atggcaggggcggcctccgcgctgtttctgctcgatatcaagggccgcgtcctcgtgtggcgcgattaccgtggcgatgtcaccgccgctcaagccgagcgtttcttcaccaaactcatcgagaaagagggagattcacagtctaatgatccggtggcttacgataatggtgtgacctacatgtttgtacagcatagtaacatttacctcatgattgcctccaggcagaactgtaacgctgcgagtcttatctccttcttgcatcgcgttgtcgatgtgttcaagcattactttgaggagttggaggaagaatcattgagggataactttgtggttgtgtatgagttacttgacgagatgatggacttcggttaccctcagtataccgaagcaaggatccttagcgagttcatcaagactgatgcttatagaatggaagttacacagagacctccaatggctgttactaacgctgtttcatggaggagcgaggggttacagtttaagaaaaacgaagttttcttggacgtaatagagagtgtaaatatccttgtgaacagtaatgggcaaatcgtgaggtctgatgtcgttggagcattgaagatgcgaacctatttgagtggaatgccagagtgtaagctaggtctgaatgatagagtactgttggaagcacagggacgagcaacaaaaggaaaagcaattgatttggaggacatcaaatttcatcagtgtgttcgattggcccgttttgagaacgataggacgatatctttcataccacctgatggggcttttgatttaatgacgtatagactcagtacccaggtcaagcctcttatatgggtcgaagctcagatagagaggcattccagaagtcgtgttgagatgctagttaaagctagaagccagttcaaggaaagaagcactgcaacgaatgttgagatcgagttgcctgtaccaactgatgcatccaaccccaccgtaagaacatctctagggtctgccgcatatgctcccgaaaaagatgctctggtttggaaaatcaaatctttccctgggaacaaggagtatatgttgagagcagagttccatcttccaagtataaccgcagaggaagccacacctgagagaaaagctcctatccgtgtcaaattcgagatcccttacttcactgtttcaggaatacaggttcggtatctgaagatcattgagaagagtgggtaccaagctcttccgtgggtgagatatataactatggctggtgagtacgaactcagactcatgtaa

SEQ ID NO: 37 - DNA, 1438 bp, Brassica oleracea
  source 1..1438: mol_type = genomic DNA
atggcaggggcggcctccgcgctgtttctgctcgatatcaagggccgcgtcctcgtgtggcgcgattaccgtggcgacgtcaccgccgctcaagccgagcgtttcttcaccaaactcatcgagaaagagggcgattcacagtctaatgatccggtggcttacgataatggtgtgacctacatgtttgtacagcatagtaacatttacctcatgatagcctccaggcagaactgtaacgctgcgagtcttatctccttcttgcatcgcgtcgtcgacgtcttcaagcattactttgaggagttggaggaagaatcactgagggataactttgtggttgtgtatgagttacttgacgagatgatggactttggttaccctcagtatactgaagcaaggatccttagtgagttcatcaagaccgatgcttatagaatggaggttacacagagacctcctatggctgtcactaacgctgtttcttggaggagtgagggcttacagtttaagaaaaacgaagttttcttggacgtaatagagagtgtaaatatccttgtgaacagtaatgggcaaattgtgaggtctgatgtcgttggagcattgaagatgcgaacatatttgagtggaatgccagagtgtaagctaggtctgaatgatagagtactactggaagcgcaggggcgagcaacaaaaggaaaagcaattgatttggaggacatcaagtttcatcagtgtgttcgattggcacgttttgagaacgataggacgatatctttcataccacctgatggggcttttgatttaatgacatatagactcagtacccaggtcaagcctcttatatgggtcgaagctcagatagagaggcattccagaagtcgtgttgagatgctagttaaagctagaagccagttcaaggaaagaagcactgcaacgaatgttgagatcgagttgcctgtaccaactgatgcatccaaccccaccgtaagaacatctctagggtctgccgcatatgctcccgaaaaagatgctctggtttggaaaatcaaatctttccctgggaacaaggagtatatgttgagagcagagttccatcttccaagtgtaaccgcagaggaagcaacgcctgagagaaaagctcctatccgtgtcaaatttgagatcccttacttcactgtttcaggaatacaggttcgatacctgaagatcattgagaagagtgggtaccaagctcttccgtgggtgagatatataaccatggctggtgagtacgaactcagactcatgtaacatgagatctgtgttgttttttgttttttttttttttatttacgccatttgtcaagaaaagaaaccagaggaagatcaaagaaaaggaaaaaaaagatttgaaaaatttagctgatgaaaattacggtgaaatgttgttttgggatccata

SEQ ID NO: 38 - DNA, 1281 bp, Capsicum annuum
  source 1..1281: mol_type = genomic DNA
atggcaggggcggcctccgcgctgttcctccttgacatcaaaggcagagtactcgtctggcgtgattatcgtggtgacatcacttcaatacaagccgaacaattcttcactaagctcattgaaaaagagggtgatccacaggatcctgtagcatatgataatggagtgacctatatgtttatacagcataataatgtgtatctcatgactgcatcgaggcagaactgcaatgcagctagtctccttctgtttctacaccgtgtcgtagatgtattcaaacattattttgaagagttagaagaggaatccctccgtgataattttgttgtagtgtatgagctacttgatgaaatgatggacttcggttatcctcaatatactgaagcaaaaattctcagtgagtttataaaaactgatgcatataggatggaggttacacaaaggcctccaatggcagttacaaatgctgtgtcctggcgtagtgaagggatacgctacaagaagaatgaagtgtttttggatgtcgttgagagtgtaaatatacttgtaaacagcaacgggcaaatagtgcggtcagatgttgttggtgcactgaagatgaggacatatttgagtggcatgcctgagtgtaagcttggtctgaatgatagaatgttgctggaagcacaagggagaactacgaaggggaaggccattgatctagatgatatcaagtttcatcagtgtgtgcgcttggcccgatttgaaaatgatcgcactatatcatttgtacctccagatggatcttttgatcttatgacctatagacttggtactcaggtaaagcctctcatatgggtagaagctcaagtggaaagacattctaggagccgtatggaaattgtggttaaagcacggagccagttcaaggaacgaagtactgcaactaatgttgaaattgagttacccgtggcaacggatgctacaaatccaaatgtccgaacatcaatgggatcatctacttatgcacctgaaaaagatgcactgatttggaaaataaaatctttcccaggtggtaaggaatatatgttgagagcggagtttactcttcccagtattacagcagaagaatcagttcctgagagaaaagctcctatacgtgtaaaatttgaaataccttattttacagtttcgggtatacaggttcgctacttgaagattattgagaaaagtggctatcaggctcttccatgggtgagatatattactatggctggtgaatatgagttaagactagtataa

SEQ ID NO: 39 - DNA, 1287 bp, Chenopodium quinoa
  source 1..1287: mol_type = genomic DNA
atgtcgggagcggcctcagcgctgttccttctagacattaaaggtagagttctcatatggcgggattatcgtggtgatgtttcagcggttcaagctgagaaattcttcaccaagttcatcgagaaagagggtgatccacagtctcaagatccagttgtgtatgataatggggttacatacatgtttatacaacacaacaatgtgtatttacttatagctactcggcaaaactgcaatgctgctagtcttcttctctttctccaccgtgtagttgatgtgttcaagcattatttcgaagagctagaagaagaatcacttagagataactttgttgtagtgtatgagttacttgatgaaattatggatttcggctatcctcagttcacagaagcaaagatccttagtgagtttattaaaactgatgcttataggatggaagtcacacagagacctcctatggctgtgaccaatgcagtttcatggcgtagtgaaggaatatcttacaagaagaatgaggtatttttggatgttgttgagagtgtcaatatacttgtaaacagcaacgggcagattataagatcagatgttgttggggcattgaagatgagaacatatttgagtgggatgcctgaatgtaaactaggcctgaatgatagagtattactggaggctcaaggacgaacaactaaggggaaggctatcgacttggacgacatcaaatttcatcagtgtgtacgtttagctcgttttgaaaatgataggaccatatcatttataccgccagatgggtcgtttgatctcatgacatatagactcagtactcaggtgaagcctctaatttgggttgaagcccagattgagaggcactccagaagccgtattgagattacagtgaaagctagaagccagtttaaggagcgaagcactgcaacaaatgttgagattgaactaccagttccatctgatgccaccaatccaaatattcgcacctcgatgggatctgctgcttatgcacctgagaaggatgctttagtctggaaaataaaatctttccctggtggcaaggaatacatgttgagggcggagtttagtcttcctagcatcactagtgaagagacactacctgaaagaaaagctcctatacgggtgaaatttgaaatcccgtattttacagtgtctggaatccaggttcgttatcttaagatcattgagaagagtggataccaggctctgccatgggtgaggtacataacaatggctggtgagtacgagctgaggctaatgtaa

SEQ ID NO: 40 - DNA, 1287 bp, Chenopodium quinoa
  source 1..1287: mol_type = genomic DNA
atgtcgggagcggcctcagcgctgttccttctagacattaaaggtagagttctcatatggcgggattatcgcggtgatgtttcagcggttcaagctgagaaattcttcactaagttcatcgagaaagagggtgatccacagtcgcaagatccagttgtgtacgataatggggttacatacatgtttatacaacacaacaatgtgtatttacttattgctactcggcaaaactgcaatgctgctagtgttcttctctttctccaccgtgtagttgatgtgttcaagcattattttgaagagctagaagaagagtcacttagagataactttgttgtagtgtatgagttacttgatgaaattatggatttcggctatcctcagttcacagaagcaaagatccttagtgagtttattaaaactgatgcttataggatggaagtcacacagagacctcctatggctgtgaccaatgcagtttcatggcgtagtgaaggaatatcttacaagaagaatgaggtatttttggatgttgttgagagtgtcaatatacttgtaaacagcaacgggcagattataagatcagatgttgttggggcattgaagatgagaacatatttgagtgggatgcctgaatgtaaactaggcctgaatgatagagtattactggaggctcaaggacgaacaacaaaggggaaggctattgacctggacgacataaaatttcatcagtgtgtacgtttagctcgttttgaaaatgataggaccatatcatttataccaccagatgggtcttttgatctcatgacatatagactcagtactcaggtgaagcctctaatttgggttgaagcccagattgagaggcactccagaagccgtattgagatcacagtgaaagctagaagccagtttaaggagcgaagcactgcaacaaatgttgagattgaactaccagttccatctgatgccaccaatccaaatatccgcacatcgatgggatctgctgcttatgcacctgagaaggatgctttagtctggaaaataaaatctttccctggtggcaaggaatacatgttgagggcggagtttagtcttcctagcatcactagtgaagagacactacctgaaagaaaagctcctatacgggtgaaatttgagatcccgtattttacagtttcaggaatccaggttcgttatcttaagatcattgagaagagtggataccaggctctgccatgggtgaggtacataacaatggctggtgagtacgagctgaggctaatgtaa

SEQ ID NO: 41 - DNA, 1287 bp, Citrullus lanatus
  source 1..1287: mol_type = genomic DNA
atggcgggggcggcctccgcgctgttcctattagacatcaaagggcgtgttctcatttggcgcgactatcgtggcgatgtctcggcagttcaggccgagcgcttcttcaccaagctcatcgagaaggagggtgatccgcaatcgcaagatccagttgtctacgataatggcataagctacatgttcattcagcacaataatgtgtacctgatggttgctgcgaggcagaattgcaatgctgcaagtcttctttcctttttgcatcgagtagttgatgtctttaagcattattttgaagagttggaagaagaatcgcttagggacaactttgttgtggtgtacgagttgcttgatgaaatcatggactttggttatcctcaatacaccgaggccaaaattcttagtgagtttataaagactgatgcttatagaatggaggttgctcagaggccacccatggcagtaacaaatgcagtttcttggcggagtgaagggataaattacaagaagaatgaggtctttttggatgtggtggagagtgttaatatacttgtcaacagtaacgggcaaataattaggtcagatgttgtgggcgcattgaagatgagaacttacttaagtggtatgcctgagtgtaagcttgggctcaatgacagagtattattggaagcacaaggccgaactacaaaaggaaaagctattgatttggaagatatcaaatttcaccagtgcgtacgcttggcccgctttgaaaatgatcggaccatatccttcatacctccagatggatcttttgatctcatgacttatagactgagcactcaggtaaagcctcttatttgggtggaagctcaagttgaaagacattcaaaaagtcgtattgagattatggtgaaagcaaggagccagttcaaggagcgaagcaccgcaacaaatgttgagatcgagttgcctgtcccagcagatgctaccaacccaaatgttcggacctcaatggggtctgcttcttatgcaccagaaaatgatgcattatgctggaaaataagatcgtttccaggtggcaaggaatatatgttaagggcagagtttcgcctgccttcaattacatctgaagaagcaactccagagagaaaagcgccaattcgtgtaaagtttgagataccatacttcactgtttctggaatccaggttcgttacctgaagataattgagaaaagtgggtaccaggctcttccatgggtgagatacatcacaatggctggagagtatgaactaaggctcatatga

SEQ ID NO: 42 - DNA, 1287 bp, Cucumis melo
  source 1..1287: mol_type = genomic DNA
atggcgggggccgcctccgcgctgttcctattagacatcaaagggcgtgttctcatttggcgcgactatcgtggcgatgtttcggcagttcaggccgaacgcttcttcaccaagctcatcgagaaggagggtgatccgcaatctcaagatccagtagtttacgataatggtataagctacatgttcattcagcacaataatgtgtacctgatggttgctgcgagacagaattgcaatgctgcaagtcttctttcttttttgcatcgagtagttgatgtcttcaagcattattttgaagagttggaagaagaatcacttagggacaactttgttgtggtgtatgagttgcttgatgaaatcatggactttggttatcctcaatacaccgaggccaaaattcttagtgagtttataaagactgatgcttatagaatggaagttgctcagagaccaccgatggcagtaacaaatgcagtttcttggcggagtgaagggataaattacaagaagaatgaggtatttttggatgtggtggagagtgttaatatacttgtcaacagtaatgggcaaataattaggtcagatgttgtgggcgcattgaagatgagaacttacttaagtggtatgcctgagtgtaagcttgggcttaacgatagagtattattggaagcacaaggccgaaccacaaaaggaaaagctattgatttagaagacatcaaatttcaccagtgtgtacgtttggcccgctttgaaaatgatcggaccatatccttcatacctccagatggagcttttgatctcatgacttatagactgagcacccaggtaaaacctcttatttgggtagaagctcaagttgagagacattcaaaaagtcgtattgagattatggtgaaagcaaggagccagttcaaggagcgaagcactgcaacaaatgttgagatcgagttgcctgtgccagcagatgccaccaacccgaatgttcggacctcaatggggtctgcttcttatgcaccagaacatgatgcattgtgctggaaaataagatcgtttccaggtggcaaggagtatatgttaagggcagagtttcgccttccttcaattacatctgaagaggcaactccagagagaaaagcgccaattcgtgtaaagttcgagataccatacttcactgtttctggaatccaggttcgttacctgaagattattgagaaaagtgggtaccaggctcttccatgggtgagatacatcacaatggccggagagtatgaactaaggctcatatga

SEQ ID NO: 43 - DNA, 1287 bp, Cucumis sativus
  source 1..1287: mol_type = genomic DNA
atggcgggggcggcctccgcgctgttcctattagacatcaaagggcgtgttctcatttggcgcgactatcgtggcgatgtttcggcagttcaggccgaacgcttcttcaccaagctcatcgagaaggagggtgatccgcaatctcaagatccagtagtttacgatagtggtataagctacatgttcattcagcacaataatgtgtacctgatggttgctgcgagacagaattgcaatgctgcaagtcttctttcttttttgcatcgagtagttgatgtcttcaagcattattttgaagagttggaagaagaatcacttagggacaactttgttgtggtgtatgagttgcttgatgaaatcatggactttggttaccctcaatacacagaggccaaaattcttagtgagtttataaagactgatgcttatagaatggaagttgctcagagaccacctatggcagtaacaaatgcagtttcttggcggagtgaagggataaattacaagaagaatgaggtctttttggatgtggtggagagtgttaatatacttgtcaacagtaatgggcaaataattaggtcagatgttgtgggcgcattgaagatgagaacttacttaagtggtatgcctgagtgtaagcttgggcttaacgatagagtattattggaagcacaaggccgaaccacaaaaggaaaagctattgatttggaagacataaaatttcaccagtgtgtacgcttggcccgctttgaaaatgatcggaccatatccttcatacctcccgatggagcttttgatctcatgacttatagactgagcacccaggtaaaacctcttatttgggtagaagctcaagttgagagacattcaaaaagtcgtattgagattatggtgaaagcaaggagccagttcaaggagcgaagcactgcaacaaatgttgagatcgagttgcctgtgccagcagatgccaccaacccgaatgttcggacctcaatggggtctgcttcttatgcaccagaaaatgatgcattgtgctggaaaataagatcgtttccaggtggcaaggagtatatgttaagggcagagtttcgccttccttcaataacatctgaagaggcaactccagagagaaaagctccaattcgtgtaaagttcgagataccatacttcactgtttctggaatccaggttcgttacctgaagattattgagaaaagtgggtaccaggctcttccatgggtgagatacatcacgatggctggagagtatgaactaaggctcatatga

SEQ ID NO: 44 - DNA, 1287 bp, Cucurbita maxima
  source 1..1287: mol_type = genomic DNA
atggcgggggcggcctccgcgctgttcctattagacatcaaagggcgtgttctcatttggcgcgattatcgtggcgatgtctcggcagttcaggccgagcgcttcttcaccaagctcatcgagaaggagggtgatccgcagtctcaagatccagtagtttacgacaatggaataagctacatgtttattcagcacaataatgtgtacctgatggttgctgcgaggcagaattgcaatgctgctagtcttctttcctttttgcaccgagtagttgatgtcttcaagcattattttgaagaactggaagaagaatcgcttagggacaactttgttgtggtgtatgagttgcttgatgaaatcatggattttggttatcctcaatacaccgaggcaaaaattcttagtgagtttataaagactgatgcttatagaatggaggttgctcagaggccacccatggcagtaacaaatgcagtttcttggcggagtgaaggtataaattacaagaagaatgaggtctttttggatgtggtggagagtgttaatatacttgtcaacagtaacgggcaaataattaggtcagatgttgtgggggcattgaagatgagaacttacttaagtggtatgcccgagtgtaagcttgggctcaatgatagagtattattggaagcacaaggccgaaccacaaaagggaaagctattgatttggaagacatcaaatttcaccagtgcgtacgtctggcccgctttgaaaatgatcggaccatatccttcataccaccagatggagcttttgatctcatgacttatagactgagcactcaggtaaagcctcttatttgggtagaagctcaaattgaaagacattcaaaaagtcgtattgagatcatggtaaaagcaagaagccagttcaaggagagaagcaccgcaacaaatgttgagattgaattgcctgtgccagcagatgctaccaacccaaatgttcggacctcaatggggtctgcttcttatgcacctgaaaatgatgcattatgctggaaaataagatcttttcccggtggcaaggagtatatgttaagagcagagtttcgccttccttcaattacatctgaagaagcaactccagagagaaaggcgccaattcgtgtaaagtttgagataccatacttcactgtttctggaatccaggttcgttacctgaagattatcgaaaaaagtgggtaccaggctcttccatgggtgagatacatcacaatggctggggagtatgaactaaggctcgtatga

SEQ ID NO: 45 - DNA, 1287 bp, Cucurbita pepo
  source 1..1287: mol_type = genomic DNA
atggcgggggcggcctccgcgctgttcctattagacatcaaagggcgtgttctcatttggcgcgattatcgtggcgatgtctcggcagttcaggccgagcgcttcttcaccaagctcatcgagaaggagggtgatccgcagtctcaagatccagtagtttacgataatggaataagctacatgtttattcagcacaataatgtgtacctgatggttgctgcgaggcagaattgcaatgctgctagtcttctttcctttttgcaccgagtagttgatgtcttcaagcattattttgaagagctggaagaagaatcgcttagggacaactttgttgtggtgtatgagttgcttgatgaaatcatggattttggttatcctcaatacaccgaggcaaaaattcttagcgagtttataaagactgatgcttatagaatggaggttgctcagaggccacccatggcagtaacaaatgcagtttcttggcggagtgaaggtataaattacaagaagaatgaggtctttttggatgtggtggagagtgttaatatacttgtcaacagtaacgggcaaataattaggtcagatgttgtgggggcattgaagatgagaacttacttaagtggtatgcccgagtgtaagcttgggctcaatgatagagtattattggaagcacaaggccgaaccacaaaagggaaagctattgatttggaagacatcaaatttcaccagtgcgtacgtttggcccgctttgaaaatgatcggaccatatccttcataccaccagatggagcttttgatctcatgacttatagactgagcactcaggtaaagcctcttatttgggtagaagctcaaattgaaagacattcaaaaagtcgtattgagattatggtaaaagcaagaagccagttcaaggagagaagcaccgcaacaaatgttgagattgagttgcctgtgccagcagatgctaccaacccaaatgttcggacctcaatggggtctgcttcttatgcacctgaaaatgatgcattatgctggaaaataagatcttttcccggtggcaaggagtatatgttaagagcagagtttcgccttccttcaattacatctgaagaagcaactccagagagaaaggcgccaattcgtgtaaagtttgagataccatacttcactgtttctggaatccaggttcgttacctgaagattatcgaaaaaagtgggtaccaggctcttccatgggtgagatacatcacaatggctggggagtatgaactaaggctcgtatga

SEQ ID NO: 46 - DNA, 1293 bp, Daucus carota
  source 1..1293: mol_type = genomic DNA
atgtcaggtgcggcctcggcgctgttcattctcgacatcaaaggccgcgtgctcgtgtggcgcgattaccgaggcgatgtcaccgccgtccaagctgaaaaatgcttcaccaagctcatcgacaaagagggagaaccagatacacagaatccagttgtgcatgatgatggcataacttatatgtttatacaacacaataatgtgtatttgatggctgcatcgaggcagaactgtaatgctgccagtatattcttatttctacaccgcgtagttgatgtatttaagcattatttcgaggagttagaagaggaatcacttagagataatttcgttgtagtgtatgagttacttgatgaaatgatggactttggttatccccaatatactgaggcgaagattcttagtgagtttattaagactgatgcatacaggatggaagttacacagaggccccctatggcagtgacaaatgcagtgtcatggcgaagtgaaggaattcgttacaagaagaatgaagcaagtcattttatgtatgtcgttgagagtgttaatatacttgtaaacagcaatggacagataatcagatctgaagttattggtgcattaaagatgcgaacatatttgagtggtatgcctgagtgcaaacttgggctaaatgatagagttttactagaagcgcaaggacgagcaaccaagggaaaggccattgacttggatgatatcaaattccatcagtgtgtgcgtctttctcgatttgaaaacgaccggacaatatcatttataccccctgatgggtcttttgatctaatgacatatagacttagcactcaggttaagcctctgatatgggtggaagctcaagtggagaggcattctagaagtcgtatggaaatcatggtaaaagcgaggagccagttcaaggaaagaagcactgcaacaaatgttgaaattgagttgcctgtgccatctgatgccatcaacccaaatctacgaacatcaatgggatctgcttcttatgcacctgaaaatgatgcattgctttggaaaatcaaatcatttccaggtggtaaggaatatatgttgagagcagagtttaatcttcctagtatcacagacgaagaagcagctccggagagaaaggctcccatacgagtgaagttcgagataccatattttactgtttcaggaatacaggtccgatacctgaagatcattgagaagagtggctatcaggctctgccatgggtgagatacataacaatggcaggtgaatatgaattgcgactcatgtga

SEQ ID NO: 47 - DNA, 1287 bp, Eruca vesicaria
  source 1..1287: mol_type = genomic DNA
atggcaggggcggcctccgcgctgtttctgctcgacatcaaaggccgtgtcctcgtctggcgcgattaccgcggtgacgtcaccgctgctcaagccgagcgtttcttcaccaaactcatcgagaaagagggagattcggagtctaatgaaccggttgtatacgataacggagtgacctacatgtttgtacagcatagtaacgtttacctcatgatagcttctaggcagaactgtaatgctgcgagccttctcttcttcctccatcgcgttatcgatgtcttcaagcattactttgaggagctggaggaagagtcattgagggataactttgtggttgtgtatgagttacttgacgagatgatggactttggttaccctcagtatactgaagcgaggatccttagtgagttcatcaagactgatgcttataggatggaagttacgcagagacctccaatggctgtcactaatgctgtttcttggaggagtgaggggttacagtttaagaaaaacgaagttttcttggacgtggtagagagtgtaaatatccttgtgaacagtaatgggcagattgtgaggtctgatgtcgttggagcattgaagatgcgaacatatctgagtggaatgccagagtgtaagctaggtttgaatgatagagtactgttggaagcacagggaagagcaacaaaaggaaaagctattgatttggaggacatcaaatttcatcagtgtgttcgattggcccgttttgagaacgataggacaatatctttcataccacctgatggggcttttgatttaatgacatatagactcagtacccaggtcaagcctcttatatgggtcgaagctcagatagagaggcattccaggagtcgtgttgagatgttagtcaaagctagaagccagttcaaggaaagaagcactgcaacaaatgttgagattgagttgcctgtaccaactgatgcatccaaccccaccgtaagaacatctctcgggtctgccgcatatgctcccgaaaaagatgcattggtttggaaaatcaaatctttccctgggaacaaggagtatatgttgagagcagagttccatctcccaagcataactgcagaggaagccacccctgagcgaaaagctcctattcgtgtcaaattcgagatcccatatttcactgtttcaggaatacaggttcggtacctgaaggtgattgagaagagtgggtaccaagctcttccgtgggtgagatatataaccatggctggtgagtacgaactcagactcatgtaa

SEQ ID NO: 48 - DNA, 1287 bp, Eruca vesicaria
  source 1..1287: mol_type = genomic DNA
atggcaggggcggcctccgcgctgtttctgctcgacatcaaaggccgtgtcctcgtctggcgcgattaccgcggcgacgtcaccgctgctcaagccgagcgtttcttcaccaaactcatcgagaaagagggagattcagagtctaacgaaccggttgtatacgataatggagtgacctacatgtttgtacagcatagtaacgtttacctcatgatagcttctaggcagaactgtaatgctgccagtcttctcttcttcctccatcgcgttatcgatgtcttcaagcattactttgaggagctggaggaggaatctttgagggataactttgtggttgtgtatgagttacttgatgaaatgatggactttggttaccctcagtatactgaagcgaggattcttagtgagttcatcaagactgatgcttataggatggaagttacgcagaggcctcccatggctgtcactaatgctgtttcttggaggagtgaggggttacagtttaagaaaaacgaagttttcttggacgtggtagagagtgtaaatatccttgtgaacagtaatgggcaaattgtgaggtctgatgtcgttggagcactgaagatgcgaacatatctgagtggaatgccagagtgtaagctaggtctgaatgatagagtactgttggaagcacagggacgagcaacaaaaggaaaagccattgatttggaggacatcaaatttcatcagtgtgttcggctggcccgttttgaaaacgataggacaatatctttcataccacctgatggggcttttgatttaatgacatatagactcagtacccaggtcaagcctcttatatgggtcgaagctcagatagagaggcattccaggagtcgtgttgagatgctagtcaaagctagaagccagttcaaggaaagaagcactgctacaaatgttgagatcgagttgcctgtaccaactgatgcatccaaccccaccgtaagaacatccctagggtctgccgcatatgctcccgaaaaggatgcactggtttggaaaatcaaatctttccctgggaacaaggagtatatgttgagagcagagttccatctcccaagcataaccgcagaggaagccacccctgagcgaaaagctcctatccgtgtcaaattcgagatcccatatttcactgtttcaggaatacaggttcggtacctgaaggtgattgagaagagtgggtaccaagctcttccgtgggtgagatatataaccatggctggtgagtacgaactcagactcatgtaa

SEQ ID NO: 49 - DNA, 1287 bp, Glycine max
  source 1..1287: mol_type = genomic DNA
atggcgggggcagcctctgctctgttcctcctcgacatcaaaggccgcgtcctcatttggcgcgactaccgcggcgacgtcactgctgtcgaagccgaacgcttcttcaccaaactcattgaaaaagagggggatccgcagtctcaagatccggttgtgtatgataatggtgtgacctacttgtttatacagcatagcaatgttttcctcatgatggctaccagacaaaactgcaatgctgctagcctccttttcttcctacatcgtatcgttgacgtgtttaagcattattttgaagaattggaagaggagtctcttagggataacttcgttgttgtgtatgaattacttgatgaaataatggactttggctacccgcaatacaccgaggcaaagatacttagtgagtttatcaagacggatgcctataggatggaagttactcagagacctcccatggctgtgacaaatgctgtatcctggcgcagtgaagggataaactacaagaaaaatgaggttttcttggatgtggtggagagtgttaacatacttgtcaatagcaatggacaaataattagatctgatgttgttggggcattgaagatgagaacatatctgagtggtatgcctgagtgtaaacttgggttaaatgatagagtattattagaggcacaaggtagaacgaccaagggaaaatcaattgacttggaggacatcaaatttcatcagtgtgtgcgtttggcccgatttgagaatgatcggacgatttcatttatccctcctgatggatcatttgatttaatgacatataggctcagtacacaggttaagcctttagtttgggtggaagcacaagttgaaaaacattcaaaaagccggattgagattatggtaaaagctaggagccaatttaaggaacgcagtactgccacaaatgttgagattgagttgcctgttcctgctgatgcaaccaatccaaatgttcggacttcaatgggatctgcatcatatgcacctgaaaaagatgcattaatctggaaaataagatcatttcctggaggcaaggagtacatgttaagggcagagtttcgtcttcccagtatagtagatgaggaagcaactcctgagagaaaagctcctatacgtgtaaaatttgagataccatattttactgtgtctgggatacaggtaagatatttgaagattattgagaaaagtgggtatcaggctcttccatgggtgagatacataacaatggctggagagtatgaactgaggctaatttga

SEQ ID NO: 50 - DNA, 1287 bp, Glycine max
  source 1..1287: mol_type = genomic DNA
atggctggggcagcctctgctctgttcctccttgacatcaaaggccgcgtcctcatctggcgcgactaccgcggtgacgtcaccgccgtcgaagctgaacgcttcttcaccaaactcatcgaaaaagagggggatccgcagtctcaagatccggttgtgtatgataatggtgtgacctacttgtttatacagcatagcaatgttttcctcatgatggctaccagacaaaactgcaatgctgctagcctccttttcttcctacaccgtatcgttgacgtgtttaagcattattttgaagaattggaagaggagtctcttagggataactttgttgttgtgtatgaattacttgatgaaataatggactttggctacccgcaatacactgaggcaaagattcttagtgagtttatcaagacggatgcctatagaatggaagttacacagagacctcccatggctgtgacaaatgctgtatcctggcgcagtgaagggataaactacaagaaaaatgaggttttcttggatgtggtggagagtgttaacatacttgtcaatagcaatggacaaataattaggtctgatgttgttggggcattgaagatgagaacatatctgagtggtatgcctgagtgtaaacttggattaaatgatagagtattattagaggcacaaggtagaacaaccaagggaaaatcaattgacttggaagacatcaaatttcatcagtgtgtgcgtttggcccgatttgagaatgatcgaacgatttcatttatccctcctgatggatcatttgatttaatgacatataggctcagtacacaggttaagcctttagtttgggtggaagcacaagttgaaaaacattcaaaaagccggatcgagattatggtaaaagctaggagtcaatttaaggaacgcagtactgccacaaatgttgagattgagttgcctgttcctgctgatgcaaccaatccaaatgttcggacttcaatgggatctgcatcatatgcacctgaaaaagatgcattaatctggaaaataagatcatttcctggaggaaaggagtacatgttaagggcagagtttcatcttcccagtatagtagatgaggaagcaactcctgagagaaaagctcctatacgtgtaaaatttgagataccatattttactgtgtctgggatacaggtaagatatttgaagattattgagaaaagtggttatcaggctcttccatgggtgagatacataacaatggctggagagtatgaactgaggctcatttga

SEQ ID NO: 51 - DNA, 1287 bp, Helianthus annuus
  source 1..1287: mol_type = genomic DNA
atggcaggggcggcctctgcgctgttccttctcgacatcaaaggccgtgttctggtgtggcgcgactaccgaggcgatgtttctgcagtgcaggctgagcggttcttcactaaactcatagagaaagagggtgatcaagacgctcaagatcctgttgtatatgataatggtgtcacctatatgtttgtacaacacaacaatgtatatctgatgactgcatcgaggcaaaactgtaatgctgctagccttctcctgtttctacatcgtgtagttgatgtatttaagcattactttgaggaactagaggaggaatcacttagggacaactttgtggtcgtgtatgaattgcttgatgaaatgatggactttggttaccctcaattcacggaagctaaaattctcagcgagtttatcaagaccgatgcttacaggatggaagttacacagaggcctcctatggctgtcacaaatgcagtgtcttggcgtagtgaagggatacgatacaagaagaatgaggtgtttttggatgttgtggagagtgtgaatatactcgtcaacagtaacggtcaaatagttaggtcagaggttgttggggcgctgaagatgagaacttatctgagtggtatgcctgagtgtaaacttgggctgaacgatagagtactattggaggcacaaggacgatcttctaagggaaaagctattgacttggatgacatcaagtttcatcagtgcgtgcgtttggcccgttttgaaaatgaccggacgatatcttttgtacctcctgatggagcttttgacctcatgacatatcgactaagtactcaggtaaagcctctaatatgggtggaagctcaaattgaaaggcattctagaagccgtatggaaataaccgtgaaagcacggagccaatttaaggagcgtagcactgcaacaaatgttgagattgaattacctgtgcctgctgatgcaaccaatccaaatgttaggacttccatgggatcagctgcctatgcaccagaaagcgatgcccttagctggaaaataaaatcatttccaggtggcaaggaatacatgttgagagcagagttcaaacttcctagtataacagcggaagaagcagccccggagagaaaagctcctattcgtgtgaagtttgagataccatattttacagtttcaggaatacaggtccgttaccttaaaatcattgagaaaagcggttaccaggctcttccatgggtgcgatatataacaatggcaggcgaatatgaactaaggctcatgtga

SEQ ID NO: 52 - DNA, 1287 bp, Helianthus annuus; identical to SEQ ID NO: 51
  source 1..1287: mol_type = genomic DNA

SEQ ID NO: 53 - DNA, 1287 bp, Humulus lupulus
  source 1..1287: mol_type = genomic DNA
atggctggagctgtctcggcgctcttccttctcgacattaaaggccgtgttttgatctgccgtgactaccgcggcgatgtctcagccgttcaggctgagcgcttcttctccaagctcatcgagaaagagggagacccacagtctcaggatccggtagtctacgataatggcattacatacatgtttattcaacacaacaatgtttatttaatggctgcttcacggcagaactgcaatgctgctagcattctgctctttcttcaccgcgtcgttgatgtctttaagcattattttgaagagttggaagaggaatcacttagggataactttgtggttgtgtatgagttgcttgatgaaattatggactttggttaccctcagtacactgaagcaaagattcttagtgaatttatcaagacggatgcttatagaatggaagttaatcaaagacctccaatggctgtcacaaatgccgtgtcttggcgcagtgaaggaatacaatacaagaaaaatgaagttttcttggatgtggtggagagtgttaatatccttgtaaacagcaacggacaaatagttaggtctgatgttgttggggcattgaagatgagaacgtatttgagtggtatgccagaatgcaagcttggccttaacgatcgagtgttgctagaggcacaaggcagagcaacaaagggaaaggccattgatttggaagacatcaaatttcatcagtgcgtgcgtttggctcggtttgaaaatgaccggacaatatcctttataccacctgatggtgcttttgatctcatgacctatagacttaatactcaggtaaagccctcgatatgggtggaagctcaagttgaaaggcattcaaagagtcgtgttgagatgacagttaaagctaggagccagttcaaggagcgtagcactgctactaacgttgagatagagctgcctgtgccttatgatgctacaaatccagatgttcggacatcaatggggtccgcagcatacgcacctgaaagtgacgcattggtttggaaaataaaatcttttcctggtggcaaggagtacatgttgagagcagagtttcgtcttccaaccataacagcagaagaaggtgctcctgagagaaaggctcctatacgcgtcaagtttgagattccatattttacagtttctggaattcaggttcgctatttgaagatcattgaaaaaagtggataccaagctcttccatgggtgagatacataacaatggctggcgagtacgaacttcgattaatataa

SEQ ID NO: 54 - DNA, 1287 bp, Lactuca sativa
  source 1..1287: mol_type = genomic DNA
atggcaggggcggcctctgcgctgttccttctcgacatcaaaggccgtgttcttgtatggcgtgactaccgtggcgatgtctccgcagttcaggccgagcgtttcttttgtaaactgatagaaaaagagggtgaaccagatgctcaagatcctgttgtgtatgataatggcgtcacctatatgttcgtacaacacaacaatgtatatctaatgactgcatccaggcagaactgtaatgcagctagccttctcctctttctacaccgtgtagttgatgtatttaagcattactttgaggagctagaggaggaatcacttagagataactttgttgttgtgtatgagttgcttgatgaaatgatggactttggttaccctcaatacactgaagctaaaattctgagtgagtttatcaagacagatgcttacaggatggaagtttcacagaggcctccaatggctgtgacaaatgctgtctcctggcgtagtgaagggatacgatacaaaaagaatgaggtgtttttggatgttgtggagagtgtgaatatacttgtcaacagcaatggtcaaatagtaaggtcagaggttgttggggcattgaagatgcgaacttatttgagtggtatgccagagtgtaagcttggtttgaatgatagagtattattggaggcacaaggaagatccacaaaaggaaaagctatcgacttggatgacatcaagtttcatcagtgtgttcggttggctcgttttgaaaatgatcgcacaatttcatttgtgccccctgatggagcttttgacctcatgacatatcgactcagtactcaggtaaagcctctgatatgggtggaagctcaaatcgaaaggcattcaagaagtcgtatggaaataacaatcaaagcccgcagccagtttaaggagaggagcactgcaacaaatgttgaaattgaatttccagtgcctgcggatgccactaatccaaatgtacggacatccatgggatcagctgcatatgcaccagaaaacgatgccctttgctggaaaattaaatcatttccaggtggcaaggaatacatgttgagagcggaattcagacttccaagtataacagctgaagaagcagtccctgagagaaaagctcccattcgtgtgaagtttgagataccatatttcacagtttcaggaatacaggtgcgttatctaaagatcattgagaaaagtggatatcaggctcttccatgggtgagatatataacaatggcgggagaatatgaactaagacttgtgtga

SEQ ID NO: 55 - DNA, 1281 bp, Nicotiana tabacum
  source 1..1281: mol_type = genomic DNA
atggcaggggcggcctctgcgctgttcctcctcgatatcaaaggccgggttctcgtctggcgtgactaccgcggcgacgtctcatccgttcaagccgaacgcttcttcaccaagctcattgaaaaagagggtgatcctcaggatcctgttgcatatgataatggcgtgacctacatgtttatacagcataacaatgtgtatctcatgactgcatcgagacagaactgtaatgcggctagtctccttctgtttctacaccgtgttgtagatgtattcaagcattactttgaagagttagaagaggaatcccttcgcgataattttgttgttgtgtatgagctacttgacgaaatgatggactttggttatcctcaatacactgaagcaaagattctcagtgagtttatcaaaactgatgcatataggatggaggttacacagaggcctccaatggcagttacaaatgctgtgtcctggcggagtgaagggatacgctataagaaaaatgaagtatttttggatgtcgtagagagtgttaatatacttgtaaacagcaatgggcaaatagtgaggtcagacgttgttggtgcactgaagatgaggacatacttgagtggtatgcctgagtgtaagcttggtcttaatgatagaatgttgctggaagcacaaggacgaactacgaaggggaaggccattgatctagatgatatcaagtttcatcagtgtgttcgcttggcccgatttgaaaacgatcgcactatatcattcatacctccagatggagcttttgatcttatgacatacagactcggtactcaggttaagcctctcatatgggtagaagctcaagtggaaagacattctaggagccgtatggaaattgtggttaaagcacggagccaattcaaggaacgaagtactgcaaccaatgttgaaattgagttacccgtggcaacggatgctacaaatccaaatgtccgaacatcaatggggtcatctacttatgcacctgagaaagatgcattgatttggaaaataaaatcttttccaggtggtaaggaatatatgttgagagcagagtttactcttcccagtattacagcagaagaatcagctcctgagagaaaagctcccatacgtgtgaagtttgaaataccttattttacagtttctggcatacaggttcgctacttgaagattattgagaaaagtggctatcaggctcttccatgggtgagatatattacgatggctggtgaatacgagttacgactaatataa

SEQ ID NO: 56 - DNA, 1287 bp, Ocimum basilicum
  source 1..1287: mol_type = genomic DNA
atggcgggagcagcatctgcgctgttcctactggacattaagggtagggttctggtgtggcgggactaccgcggagacgtttccgccgtgcaagccgaacgcttcttcaccaagctcatcgagaaagagggtgatcctgagacccaggatcctgttgtgtacgacaatggtgtgacatatatgttcatacaacacaacaatgtatatctcatgactgcgacgcggcagaactgcaatgctgctagccttctcttatttttacatagagtagttgatgtcttcaaacattactttgaagagttagaagaggaatctcttagagataattttgttgtagtgtatgagctgctggatgaaattatggactttggctacccacaatacactgaagcaaaaattcttagtgaattcataaaaactgatgcctacaggatggaagtggcacagaggcctccaatggccgtgacaaatgcagtatcatggcgcagtgaagggatacgctacaaaaagaatgaagtgtttcttgatgttgtggagtgtgtcaatatactggtcaatagtaatggccaaattattaggtcagatgttgtcggggcactaaagatgcgaacatacttgagtggtatgcccgagtgtaagcttggacttaatgatagagtgttgcttgaggcacaggggcgagcaactaagggcaaagccattgatcttgacgacatcaagtttcatcagtgtgtgcgcttggctcggtttgagaatgacagaaccatatccttcatacctcctgatgggtcatttgatcttatgacttacaggctcagcactcaggtaaagcctctaatttgggtcgaagctcaggtagagaggcactctaggagtcgtatagaaattatggtgaaagccaggagccagttcaaggagcgaagcactgcaactaatgttgaaattgagttacctgtgccacctgatgccaccaatccaaatgttcgaacttcaatgggatctgcttcttatgctccagaaaacgactcactagtttggaaaataaaatctttccctggtggtaaggaatatatgctgagggcagagtttaggcttcccagtattacatcagaggaagcagctccagaaagaaaggctcctataagggtcaagtttgaaataccatatttcactgtttcaggaatacaggtccgctacttgaaaatcattgaaaaaagtggataccaggctctcccatgggtgaggtatataacaatggctggtgaatatgagctcagacttatttga

SEQ ID NO: 57 - DNA, 1287 bp, Ocimum basilicum
  source 1..1287: mol_type = genomic DNA
atggcgggagcagcatctgcgctgttcctactggacattaagggtagggttctggtgtggcgggactaccgcggagacgtttccgccgtgcaagccgaacgcttcttcaccaagctcatcgagaaagagggtgatcctgagacccaggatcctgttgtgtacgacaatggtgtgacatatatgttcatacaacacaacaatgtatatctcatgactgcgacgcggcagaactgcaatgctgctagccttctcttatttttacatagagtagttgatgtcttcaaacattactttgaagagttggaagaggaatctcttagagataattttgttgtagtgtatgagctgctggatgaaattatggactttggctacccacaatacactgaagcaaaaattcttagtgaattcataaaaactgatgcctacaggatggaagtggcacagaggcctccgatggccgtgacaaatgcagtgtcatggcgcagtgaagggatacgctacaaaaagaatgaagtgtttcttgatgttgtggagagtgtcaatatactggtcaatagtaatggccaaattattaggtcagatgttgtcggggcactaaagatgcgaacatacttgagtggtatgcccgagtgtaagcttggacttaatgatagagtgttgcttgaggcacaagggcgagcaactaagggcaaagccattgatcttgacgacatcaagtttcatcagtgcgtacgcttggctcggtttgagaatgacagaaccatatccttcatacctcctgatgggtcatttgatctaatgacttacaggctcagcactcaggtaaagcctctaatttgggtcgaagctcaggtagagaggcactctaggagtcgtatagaaattatggtgaaagccaggacccagttcaaggagcgaagcactgcaactaatgttgaaattgagttacctgtgccacctgatgccaccaatccaaatgttcgaacttcaatgggatctgcttcttatgctccagaaaacgactcactagtttggaaaataaaatctttccctggtggtaaggaatatatgctgagagcagagtttaggcttcccagtattacatcagaggaagcagctccagaaagaaaggctcctataagggtcaagtttgaaataccatattttactgtttcaggaatacaggtccgctacttgaaaatcattgaaaaaagtgggtaccaggctctcccatgggtgaggtatataacaatggctggtgaatatgagctcagacttatttga

SEQ ID NO: 58 - DNA, 1287 bp, Phaseolus vulgaris
  source 1..1287: mol_type = genomic DNA
atgtcaggggcagtctctgctctgttccttctcgacatcaaaggccgcgtcctcatttggcgcgactaccgcggcgatgtcaccgccgtcgaagccgaacgcttcttcaccaaactaattgaaaaagagggagatccgcagtctcaagatccggttgtgtatgataatggcgtgacctacttgtttatacagcatagcaatattttcctcatgacggctaccagacaaaactgcaatgctgctagccttcttttcttcctacatcgtattgttgatgtgtttaagcattattttgaagaattggaagaggaatctcttagggacaactttgttgttgtgtatgaactgcttgatgaaataatggactttggctacccccaatatactgaggcaaagattcttagtgagtttatcaagacggatgcttataaaatggaagttacacagagacctcccatggctgtgacaaatgctgtatcctggcgcagtgaaggagtgagctacaagaaaaatgaggttttcttggatgtggtggagagtgttaacatgcttgtcaatagcaatgggcaaataattaggtctgatgtggttggggcattgaagatgagaacatatctgagtggtatgcctgagtgtaaacttgggttaaatgatagagtattattagaggcacaaggtagaacaaccaagggaaaagcaattgacttggaggacatcaaatttcatcagtgtgtgcgtttggcccgatttgagaatgaccgaacgatttcctttatccctcctgatgggtcatttgatttaatgacatataggctcagtacacaggttaagcctttaatttgggtggaagcacaagttgaaaaccattcaaaaagtcggatcgagattatggtaaaaactaggagtcaatttaaggaacgcagtactgccacaaatgttgagatcgagttgcctgtccctgctgacgcaaccaatccaaatgttcggacttcaatgggatctgcgtcatatgcacctgaaaaagatgcattaatctggaaaataagatcatttcccggaggcaaggagtacatgttaagggcagagtttcgtcttcccagtataatagacgaggaagcaactcccgagagaaaagctcccatacgcgtaaaatttgagataccctattttactgtgtctgggattcaggtaagatatttgaagattattgagaaaagtgggtatcaggctcttccatgggtgagatacataacaatggctggagagtatgaactgaggctcatttga

SEQ ID NO: 59 - DNA, 1281 bp, Solanum lycopersicum
  source 1..1281: mol_type = genomic DNA
atggcaggggcggcgtccgcgctgttcctccttgacatcaaaggccgggtcctcgtctggcgtgattaccgtggagacgtcacttcagttcaagcggaacgattcttcaccaagctcattgaaaaagagggcgatcctctggatcctgtagcatatgataatggcgtgacctatatgtttatacagcataacaatgtgtatctcatgactgcatcaaggcagaactgtaatgcagctagtctccttctgtttctacaccgtgtcgtagatgtattcaagcattattttgaagagctagaagaagaatcccttcgcgataattttgttgtggtgtatgagctacttgatgaaatgatggactttggttatcctcaatataccgaagcaaaaattcttagtgagttcataaaaactgatgcatataggatggaggttacacaaaggcctccaatggcagttacaaatgctgtgtcctggcgtagtgaagggataaattacaagaagaatgaagtgtttttggatgttgtggagagtgttaatatacttgtaaacagcaatgggcaaatagtgagatcagatgttgttggtgcactgaagatgagggcatacttgagtggcatgcctgagtgtaagcttggtcttaatgatagaatgttgctggaagcacaagggcgaactaccaaggggaaggccattgatcttgatgatatcaagtttcatcagtgtgttcgcttggcccgatttgaaaatgatcgcactatatcatttataccgccagatggagcctttgatcttatgacctacagacttggtactcaggtaaagcctctcatatgggtggaagctcaagtggaaaggcattctaggagccgtatggaaattgtggttaaagcacggagccagttcaaggaacgaagtactgcaactaatgttgaaattgagttacctgtggcaacggatgctacaaatccaaatgtccgaacatcaatgggatcatctacttatgcacctgaaaaagatgcactgatttggaaaataaaatctttcccaggtggtaaggaatatatgttgagagcggagtttactcttcccagtattacagcagaagaatcagttcctgagagaaaagctcctatacgtgtgaaatttgaaattccttattttactgtttctggtatacaggttcgctacttgaagattattgagaaaagtggctatcaggctcttccatgggtgagatatattactatggctggtgaatacgagttaagactagtataa

SEQ ID NO: 60 - DNA, 1281 bp, Solanum tuberosum
  source 1..1281: mol_type = genomic DNA
atggcaggggcggcgtccgcgctgttcctccttgacatcaaaggccgggtgctcgtctggcgtgattaccgtggagacgtcacttccgttcaagcggaacgattcttcaccaagctcattgaaaaagagggtgatcctctggatcctgtagcatatgataatggcgtgacctatatgtttatacagcataacaatgtgtatctcatgactgcatcaaggcagaactgtaatgcagctagtctccttctgtttctacaccgtgtcgtagatgtattcaagcattattttgaagagttagaagaagaatcccttcgcgataatttcgttgtagtgtatgagctactggatgaaatgatggactttggttatcctcaatatactgaagcaaaaattctcagtgagttcataaaaactgatgcatataggatggaggttacacaaaggcctccaatggcagttacaaatgctgtgtcctggcgtagtgaagggataaactacaagaagaatgaagtgtttttggatgttgtggagagtgttaatatacttgtaaacagcaacgggcaaatagtgagatcagatgttgttggtgcactgaagatgagggcatacttgagtggcatgcctgagtgtaagcttggtcttaatgatagaatgttgctggaagcacaagggcgaactaccaaggggaaggccattgatcttgatgatatcaagtttcatcagtgtgttcgcttggcccgatttgaaaatgatcgcactatatcatttataccgccagatggagcctttgatcttatgacctacagacttggtactcaggtaaagcctctcatatgggtagaagctcaagtggaaagacattctaggagccgtatggaaattgtggttaaagcacggagccagttcaaggaacgaagtactgcaactaatgttgaaattgagttacctgtggcaacggacgctacaaatccaaatgtccgaacatcaatgggatcatctacttatgcacctgaaaaagatgcactgatttggaaaataaaatctttcccaggtggtaaggaatatatgttgagagcggagtttactcttcccagtattacagcggaagaatcagttcctgagagaaaagctcctatacgtgtgaaatttgaaattccttattttactgtttctggtatacaggttcgctacttgaagattattgagaaaagtggctatcaggctcttccatgggtgagatatattactatggctggtgaatacgagctaagactagtataa

SEQ ID NO: 61 - DNA, 1206 bp, Solanum tuberosum
  source 1..1206: mol_type = genomic DNA
atgtctcctccgtccaggccgaacgattcttcaccaagctccttgagaaagagggtgaccctcaagatcctgttgcatatgataatggcgtgacatatatgtttatacagcacaataatgtatacctcatgaccgcatcaaggcagaattgtaatgctgctagtattcttctgtttctacaccgtgttgttgatgtctttaagcattactttgaagagctagaagaggaatccctacgagataattttgttgtagtgtatgaattacttgatgaaatgatggactttggttatcctcaatatactgaagcaaaaattctcagtgagtttataaaaactgatgcatatagaatggaggttacacaaaggcctccaatggcagttacaaatgctgtgtcctggcgcagtgaagggatccaatacaagaagaatgaagtatttttggatgttgtggagagtgttaatatacttgttaatagcaatgggcaaatagtgaggtcagatgttgtcggtgcattgaagatgcggacatacttgagtggtatgccggagtgtaagcttggtctgaatgatagagtattgctggaagcacaaggacgtaatgctaaggggaaggctattgatctagatgatatcaagtttcatcagtgtgtgcgtttggcccgatttgagaatgatcgtactatatcattcatacctcctgatggggctttcgaagttatgacctacagactcagtacacaggtaaagcctcttgtgtgggtagaagcccaagtggaaagacattctaagagccgtgtggaaattctggttaaagcacgaagccagttcaaggagagaagcactgcaactaacgttgaaattgagttgcccgttccaactgatgcaactaatccagatgttcgtacatcaatgggatcatctacttatgcacctgaaaaggatgcattgatttggaagataaaatcttttccaggtggtaaggaatatatgttgagagcagagtttaaacttcccagcattacagcagaagaagcagttcctgaaagaaaagctcctatacgtgtgaaatttgagataccatattttacagtttcgggtatacaggttcgctacttgaagataattgaaaaaagtggttatcaggctcttccttgggtgcgatatattaccatggctggtgaatatgagttgagacttacgtaaa

SEQ ID NO: 62 - DNA, 1287 bp, Vitis vinifera
  source 1..1287: mol_type = genomic DNA
atggcgggggccgcctcggcactcttccttctcgacatcaaaggccgcgttctggtgtggcgcgattacaggggcgatgtctctgctgttcaagccgagcgcttcttcgccaagctcatggagaaagagggtgatccagagtctcaagatcctgttgtgtatgataatggtgttacatacatgtttatacaacacaataatgttttcctaatgaccgcatcaaggcagaactgcaatgctgccagccacctcctctttctacaccgtgttgttgatgtctttaagcattattttgaagagttagaagaggaatcacttagggataattttgtggtagtgtatgagttgcttgatgagatgatggactttggttaccctcagtatactgaagcaaagattctgagtgaatttatcaagactgatgcttataggatggaagtttcccagaggcctcccatggctgtaacaaatgcggtgtcttggcgcagtgaagggatacgttacaagaagaatgaagtattcttggatgtggtggaaagtgttaatatacttgtaaacagcaatgggcaaataattagatcggatgttgttggagcattgaagatgagaacatatttgagtggtatgccagagtgtaagcttgggctaaacgacagagtattgttggaggcacaaggtcgatcaacaaaaggaaaagccattgatctggatgacatcaagttccaccaatgtgttcgtttggctcgatttgagaatgatcgaacaatatcctttattcctccagatggatcttttgatctcatgacatataggctcagtactcaggtaaaacctctgatatgggtggaagctcaagttgaaaggcattcaagaagtcgtatcgagatcatggtcaaagcacggagccagttcaaggagcgtagcactgcaacaaatgttgaaattgaattgcctgtaccatctgatgctaccaatccaaatattcgaacatcaatgggatctgctgcatatgcacctgagaatgatgcattactctggaagataaagtcttttcctggtggcaaggagtatatgttgagggcagagttcagtcttcccagtataacagctgaagaaggagctcctgagagaaaagctcccatacgtgtgaagtttgagataccatattttactgtttctggaatacaggttcgctacctgaagatcattgagaaaagtggttatcaggctctgccttgggtgagatacataactatggctggggagtatgaactaagacttatttaa

SEQ ID NO: 63 - DNA, 1290 bp, Zea mays
  source 1..1290: mol_type = genomic DNA
atggcgggcgccgtgtcggcgctcttcctgctggacattaagggccgcgtcctcgtctggcgcgactatcgtggtgatgtctccgcgctccaggccgagcgcttcttcaccaagctcctcgacaaggagggcgactcggaagtccactcgcctgtggtctacgacgacgccggcgtcacgtacatgttcatccagcacaacaatgtcttcctcctcaccgctgctcgccagaactgcaacgcggccagcatcctcctcttcctccaccgtgtcgtagatgtgtttaagcactacttcgaggaactggaagaggagtcgctcagagataacttcgtcgttgtgtatgagttgctggatgagatgatggatttcgggtacccacaatacacggaggcgaagatcctaagtgagttcatcaagacagatgcgtacaggatggaggtcacacagcgtccacccatggccgtgacaaatgctgtgtcatggaggagcgaggggatccgttacaagaagaatgaagtcttcttggatgtagtagagagtgttaacattctagttaacagcaatgggcagattgtgagatcagatgtggttggggcactgaagatgcgaacatatttgagtggaatgcctgagtgcaaactcggcttgaatgatagggttcttttggaggctcaaggcagagcaactaaaggaaaagcgatagaccttgatgatatcaaatttcatcagtgtgtacgtttagctagattcgagaatgatagaactatatcgttcatacctcctgatggatcttttgatctaatgacatacaggcttagcactcaggtaaaacctcttatctgggtcgaagcacagattgagaaacattctagaagccgtatagaactcatggtgaaggcaaggagtcagttcaaggaaagaagcacagcaacaaatgttgaaattgaagtgcctgttccttcagatgccacaaacccaaatataagaacttcaatgggttctgctgcatatgctcctgagagagatgcaatggtctggaaagtaaaatcattccctggtggcaaggaatacatgtgcagagcagaatttagtcttcctagcataacagcggaagaaggggccccagaaaagaaggcaccaatacgagtgaaatttgagataccatatttcaccgtatcaggtattcaggtccgttatctgaagataattgaaaagagtggttaccaggcactcccctgggttagatatatcacgatggctggcgaatatgagctgagacttatatga

SEQ ID NO: 64 - protein, 428 aa, Beta vulgaris
MSGAASALFLLDIKGRVLIWRDYRGDVSAVQAERFFTKFIEKEGDPQSQDPVVHDNGITYMFIQHNNVYLLIAARQNCNAASLLLFLHRLVDVFKHYFEELEEESLRDNFVVVYELLDEIMDFGYPQFTEAKILSEFIKTDAYRMEVTQRPPMAVTNAVSWRSEGIAYKKNEVFLDVVESVNILVNSNGQIIRSDVVGALKMRTYLSGMPECKLGLNDRVLLEAQGRTTKGKAIDLDDIKFHQCVRLARFENDRTISFIPPDGSFDLMTYRLSTQVKPLVWVEAQIERHSRSRIEIMVKARSQFKERSTATNVEIELPVPADATNPNIRTSMGSASYAPEKDALVWKIKSFPGGKEYMLRAEFSLPSITSDEATPERKAPIRVKFEIPYFTVSGIQVRYLKIIEKSGYQALPWVRYITMAGEYELRLM

SEQ ID NO: 65 - protein, 428 aa, Brassica napus
MAGAASALFLLDIKGRVLVWRDYRGDVTAAQAERFFTKLIEKEGDSQSNDPVAYDNGVTYMFVQHSNIYLMIASRQNCNAASLISFLHRVVDVFKHYFEELEEESLRDNFVVVYELLDEMMDFGYPQYTEARILSEFIKTDAYRMEVTQRPPMAVTNAVSWRSEGLQFKKNEVFLDVIESVNILVNSNGQIVRSDVVGALKMRTYLSGMPECKLGLNDRVLLEAQGRATKGKAIDLEDIKFHQCVRLARFENDRTISFIPPDGAFDLMTYRLSTQVKPLIWVEAQIERHSRSRVEMLVKARSQFKERSTATNVEIELPVPTDASNPTVRTSLGSAAYAPEKDALVWKIKSFPGNKEYMLRAEFHLPSITAEEATPERKAPIRVKFEIPYFTVSGIQVRYLKIIEKSGYQALPWVRYITMAGEYELRLM

SEQ ID NO: 66 - protein, 428 aa, Brassica oleracea
MAGAASALFLLDIKGRVLVWRDYRGDVTAAQAERFFTKLIEKEGDSQSNDPVAYDNGVTYMFVQHSNIYLMIASRQNCNAASLISFLHRVVDVFKHYFEELEEESLRDNFVVVYELLDEMMDFGYPQYTEARILSEFIKTDAYRMEVTQRPPMAVTNAVSWRSEGLQFKKNEVFLDVIESVNILVNSNGQIVRSDVVGALKMRTYLSGMPECKLGLNDRVLLEAQGRATKGKAIDLEDIKFHQCVRLARFENDRTISFIPPDGAFDLMTYRLSTQVKPLIWVEAQIERHSRSRVEMLVKARSQFKERSTATNVEIELPVPTDASNPTVRTSLGSAAYAPEKDALVWKIKSFPGNKEYMLRAEFHLPSVTAEEATPERKAPIRVKFEIPYFTVSGIQVRYLKIIEKSGYQALPWVRYITMAGEYELRLM

SEQ ID NO: 67 - protein, 426 aa, Capsicum annuum
MAGAASALFLLDIKGRVLVWRDYRGDITSIQAEQFFTKLIEKEGDPQDPVAYDNGVTYMFIQHNNVYLMTASRQNCNAASLLLFLHRVVDVFKHYFEELEEESLRDNFVVVYELLDEMMDFGYPQYTEAKILSEFIKTDAYRMEVTQRPPMAVTNAVSWRSEGIRYKKNEVFLDVVESVNILVNSNGQIVRSDVVGALKMRTYLSGMPECKLGLNDRMLLEAQGRTTKGKAIDLDDIKFHQCVRLARFENDRTISFVPPDGSFDLMTYRLGTQVKPLIWVEAQVERHSRSRMEIVVKARSQFKERSTATNVEIELPVATDATNPNVRTSMGSSTYAPEKDALIWKIKSFPGGKEYMLRAEFTLPSITAEESVPERKAPIRVKFEIPYFTVSGIQVRYLKIIEKSGYQALPWVRYITMAGEYELRLV

SEQ ID NO: 68 - protein, 428 aa, Chenopodium quinoa
MSGAASALFLLDIKGRVLIWRDYRGDVSAVQAEKFFTKFIEKEGDPQSQDPVVYDNGVTYMFIQHNNVYLLIATRQNCNAASVLLFLHRVVDVFKHYFEELEEESLRDNFVVVYELLDEIMDFGYPQFTEAKILSEFIKTDAYRMEVTQRPPMAVTNAVSWRSEGISYKKNEVFLDVVESVNILVNSNGQIIRSDVVGALKMRTYLSGMPECKLGLNDRVLLEAQGRTTKGKAIDLDDIKFHQCVRLARFENDRTISFIPPDGSFDLMTYRLSTQVKPLIWVEAQIERHSRSRIEITVKARSQFKERSTATNVEIELPVPSDATNPNIRTSMGSAAYAPEKDALVWKIKSFPGGKEYMLRAEFSLPSITSEETLPERKAPIRVKFEIPYFTVSGIQVRYLKIIEKSGYQALPWVRYITMAGEYELRLM

SEQ ID NO: 69 - protein, 428 aa, Chenopodium quinoa; identical to SEQ ID NO: 68

SEQ ID NO: 70 - protein, 428 aa, Citrullus lanatus
MAGAASALFLLDIKGRVLIWRDYRGDVSAVQAERFFTKLIEKEGDPQSQDPVVYDNGISYMFIQHNNVYLMVAARQNCNAASLLSFLHRVVDVFKHYFEELEEESLRDNFVVVYELLDEIMDFGYPQYTEAKILSEFIKTDAYRMEVAQRPPMAVTNAVSWRSEGINYKKNEVFLDVVESVNILVNSNGQIIRSDVVGALKMRTYLSGMPECKLGLNDRVLLEAQGRTTKGKAIDLEDIKFHQCVRLARFENDRTISFIPPDGSFDLMTYRLSTQVKPLIWVEAQVERHSKSRIEIMVKARSQFKERSTATNVEIELPVPADATNPNVRTSMGSASYAPENDALCWKIRSFPGGKEYMLRAEFRLPSITSEEATPERKAPIRVKFEIPYFTVSGIQVRYLKIIEKSGYQALPWVRYITMAGEYELRLI

SEQ ID NO: 71 - protein, 428 aa, Cucumis melo
MAGAASALFLLDIKGRVLIWRDYRGDVSAVQAERFFTKLIEKEGDPQSQDPVVYDNGISYMFIQHNNVYLMVAARQNCNAASLLSFLHRVVDVFKHYFEELEEESLRDNFVVVYELLDEIMDFGYPQYTEAKILSEFIKTDAYRMEVAQRPPMAVTNAVSWRSEGINYKKNEVFLDVVESVNILVNSNGQIIRSDVVGALKMRTYLSGMPECKLGLNDRVLLEAQGRTTKGKAIDLEDIKFHQCVRLARFENDRTISFIPPDGAFDLMTYRLSTQVKPLIWVEAQVERHSKSRIEIMVKARSQFKERSTATNVEIELPVPADATNPNVRTSMGSASYAPEHDALCWKIRSFPGGKEYMLRAEFRLPSITSEEATPERKAPIRVKFEIPYFTVSGIQVRYLKIIEKSGYQALPWVRYITMAGEYELRLI

SEQ ID NO: 72 - protein, 428 aa, Cucumis sativus
MAGAASALFLLDIKGRVLIWRDYRGDVSAVQAERFFTKLIEKEGDPQSQDPVVYDSGISYMFIQHNNVYLMVAARQNCNAASLLSFLHRVVDVFKHYFEELEEESLRDNFVVVYELLDEIMDFGYPQYTEAKILSEFIKTDAYRMEVAQRPPMAVTNAVSWRSEGINYKKNEVFLDVVESVNILVNSNGQIIRSDVVGALKMRTYLSGMPECKLGLNDRVLLEAQGRTTKGKAIDLEDIKFHQCVRLARFENDRTISFIPPDGAFDLMTYRLSTQVKPLIWVEAQVERHSKSRIEIMVKARSQFKERSTATNVEIELPVPADATNPNVRTSMGSASYAPENDALCWKIRSFPGGKEYMLRAEFRLPSITSEEATPERKAPIRVKFEIPYFTVSGIQVRYLKIIEKSGYQALPWVRYITMAGEYELRLI

SEQ ID NO: 73 - protein, 428 aa, Cucurbita maxima
MAGAASALFLLDIKGRVLIWRDYRGDVSAVQAERFFTKLIEKEGDPQSQDPVVYDNGISYMFIQHNNVYLMVAARQNCNAASLLSFLHRVVDVFKHYFEELEEESLRDNFVVVYELLDEIMDFGYPQYTEAKILSEFIKTDAYRMEVAQRPPMAVTNAVSWRSEGINYKKNEVFLDVVESVNILVNSNGQIIRSDVVGALKMRTYLSGMPECKLGLNDRVLLEAQGRTTKGKAIDLEDIKFHQCVRLARFENDRTISFIPPDGAFDLMTYRLSTQVKPLIWVEAQIERHSKSRIEIMVKARSQFKERSTATNVEIELPVPADATNPNVRTSMGSASYAPENDALCWKIRSFPGGKEYMLRAEFRLPSITSEEATPERKAPIRVKFEIPYFTVSGIQVRYLKIIEKSGYQALPWVRYITMAGEYELRLV

SEQ ID NO: 74 - protein, 428 aa, Cucurbita pepo; identical to SEQ ID NO: 73

SEQ ID NO: 75 - protein, 430 aa, Daucus carota
MSGAASALFILDIKGRVLVWRDYRGDVTAVQAEKCFTKLIDKEGEPDTQNPVVHDDGITYMFIQHNNVYLMAASRQNCNAASIFLFLHRVVDVFKHYFEELEEESLRDNFVVVYELLDEMMDFGYPQYTEAKILSEFIKTDAYRMEVTQRPPMAVTNAVSWRSEGIRYKKNEASHFMYVVESVNILVNSNGQIIRSEVIGALKMRTYLSGMPECKLGLNDRVLLEAQGRATKGKAIDLDDIKFHQCVRLSRFENDRTISFIPPDGSFDLMTYRLSTQVKPLIWVEAQVERHSRSRMEIMVKARSQFKERSTATNVEIELPVPSDAINPNLRTSMGSASYAPENDALLWKIKSFPGGKEYMLRAEFNLPSITDEEAAPERKAPIRVKFEIPYFTVSGIQVRYLKIIEKSGYQALPWVRYITMAGEYELRLM

SEQ ID NO: 76 - protein, 428 aa, Eruca vesicaria
MAGAASALFLLDIKGRVLVWRDYRGDVTAAQAERFFTKLIEKEGDSESNEPVVYDNGVTYMFVQHSNVYLMIASRQNCNAASLLFFLHRVIDVFKHYFEELEEESLRDNFVVVYELLDEMMDFGYPQYTEARILSEFIKTDAYRMEVTQRPPMAVTNAVSWRSEGLQFKKNEVFLDVVESVNILVNSNGQIVRSDVVGALKMRTYLSGMPECKLGLNDRVLLEAQGRATKGKAIDLEDIKFHQCVRLARFENDRTISFIPPDGAFDLMTYRLSTQVKPLIWVEAQIERHSRSRVEMLVKARSQFKERSTATNVEIELPVPTDASNPTVRTSLGSAAYAPEKDALVWKIKSFPGNKEYMLRAEFHLPSITAEEATPERKAPIRVKFEIPYFTVSGIQVRYLKVIEKSGYQALPWVRYITMAGEYELRLM

SEQ ID NO: 77 - protein, 428 aa, Eruca vesicaria; identical to SEQ ID NO: 76

SEQ ID NO: 78 - protein, 428 aa, Glycine max
MAGAASALFLLDIKGRVLIWRDYRGDVTAVEAERFFTKLIEKEGDPQSQDPVVYDNGVTYLFIQHSNVFLMMATRQNCNAASLLFFLHRIVDVFKHYFEELEEESLRDNFVVVYELLDEIMDFGYPQYTEAKILSEFIKTDAYRMEVTQRPPMAVTNAVSWRSEGINYKKNEVFLDVVESVNILVNSNGQIIRSDVVGALKMRTYLSGMPECKLGLNDRVLLEAQGRTTKGKSIDLEDIKFHQCVRLARFENDRTISFIPPDGSFDLMTYRLSTQVKPLVWVEAQVEKHSKSRIEIMVKARSQFKERSTATNVEIELPVPADATNPNVRTSMGSASYAPEKDALIWKIRSFPGGKEYMLRAEFRLPSIVDEEATPERKAPIRVKFEIPYFTVSGIQVRYLKIIEKSGYQALPWVRYITMAGEYELRLI

SEQ ID NO: 79 - protein, 428 aa, Glycine max
MAGAASALFLLDIKGRVLIWRDYRGDVTAVEAERFFTKLIEKEGDPQSQDPVVYDNGVTYLFIQHSNVFLMMATRQNCNAASLLFFLHRIVDVFKHYFEELEEESLRDNFVVVYELLDEIMDFGYPQYTEAKILSEFIKTDAYRMEVTQRPPMAVTNAVSWRSEGINYKKNEVFLDVVESVNILVNSNGQIIRSDVVGALKMRTYLSGMPECKLGLNDRVLLEAQGRTTKGKSIDLEDIKFHQCVRLARFENDRTISFIPPDGSFDLMTYRLSTQVKPLVWVEAQVEKHSKSRIEIMVKARSQFKERSTATNVEIELPVPADATNPNVRTSMGSASYAPEKDALIWKIRSFPGGKEYMLRAEFHLPSIVDEEATPERKAPIRVKFEIPYFTVSGIQVRYLKIIEKSGYQALPWVRYITMAGEYELRLI

SEQ ID NO: 80 - protein, 428 aa, Helianthus annuus
MAGAASALFLLDIKGRVLVWRDYRGDVSAVQAERFFTKLIEKEGDQDAQDPVVYDNGVTYMFVQHNNVYLMTASRQNCNAASLLLFLHRVVDVFKHYFEELEEESLRDNFVVVYELLDEMMDFGYPQFTEAKILSEFIKTDAYRMEVTQRPPMAVTNAVSWRSEGIRYKKNEVFLDVVESVNILVNSNGQIVRSEVVGALKMRTYLSGMPECKLGLNDRVLLEAQGRSSKGKAIDLDDIKFHQCVRLARFENDRTISFVPPDGAFDLMTYRLSTQVKPLIWVEAQIERHSRSRMEITVKARSQFKERSTATNVEIELPVPADATNPNVRTSMGSAAYAPESDALSWKIKSFPGGKEYMLRAEFKLPSITAEEAAPERKAPIRVKFEIPYFTVSGIQVRYLKIIEKSGYQALPWVRYITMAGEYELRLM

SEQ ID NO: 81 - protein, 428 aa, Helianthus annuus; identical to SEQ ID NO: 80

SEQ ID NO: 82 - protein, 428 aa, Humulus lupulus
MAGAVSALFLLDIKGRVLICRDYRGDVSAVQAERFFSKLIEKEGDPQSQDPVVYDNGITYMFIQHNNVYLMAASRQNCNAASILLFLHRVVDVFKHYFEELEEESLRDNFVVVYELLDEIMDFGYPQYTEAKILSEFIKTDAYRMEVNQRPPMAVTNAVSWRSEGIQYKKNEVFLDVVESVNILVNSNGQIVRSDVVGALKMRTYLSGMPECKLGLNDRVLLEAQGRATKGKAIDLEDIKFHQCVRLARFENDRTISFIPPDGAFDLMTYRLNTQVKPSIWVEAQVERHSKSRVEMTVKARSQFKERSTATNVEIELPVPYDATNPDVRTSMGSAAYAPESDALVWKIKSFPGGKEYMLRAEFRLPTITAEEGAPERKAPIRVKFEIPYFTVSGIQVRYLKIIEKSGYQALPWVRYITMAGEYELRLI

SEQ ID NO: 83 - protein, 427 aa, Lactuca sativa
MAGAASAFLLDIKGRVLVWRDYRGDVSAVQAERFFCKLIEKEGEPDAQDPVVYDNGVTYMFVQHNNVYLMTASRQNCNAASLLLFLHRVVDVFKHYFEELEEESLRDNFVVVYELLDEMMDFGYPQYTEAKILSEFIKTDAYRMEVSQRPPMAVTNAVSWRSEGIRYKKNEVFLDVVESVNILVNSNGQIVRSEVVGALKMRTYLSGMPECKLGLNDRVLLEAQGRSTKGKAIDLDDIKFHQCVRLARFENDRTISFVPPDGAFDLMTYRLSTQVKPLIWVEAQIERHSRSRMEITIKARSQFKERSTATNVEIEFPVPADATNPNVRTSMGSAAYAPENDALCWKIKSFPGGKEYMLRAEFRLPSITAEEAVPERKAPIRVKFEIPYFTVSGIQVRYLKIIEKSGYQALPWVRYITMAGEYELRLV

SEQ ID NO: 84 - protein, 426 aa, Nicotiana tabacum
MAGAASALFLLDIKGRVLVWRDYRGDVSSVQAERFFTKLIEKEGDPQDPVAYDNGVTYMFIQHNNVYLMTASRQNCNAASLLLFLHRVVDVFKHYFEELEEESLRDNFVVVYELLDEMMDFGYPQYTEAKILSEFIKTDAYRMEVTQRPPMAVTNAVSWRSEGIRYKKNEVFLDVVESVNILVNSNGQIVRSDVVGALKMRTYLSGMPECKLGLNDRMLLEAQGRTTKGKAIDLDDIKFHQCVRLARFENDRTISFIPPDGAFDLMTYRLGTQVKPLIWVEAQVERHSRSRMEIVVKARSQFKERSTATNVEIELPVATDATNPNVRTSMGSSTYAPEKDALIWKIKSFPGGKEYMLRAEFTLPSITAEESAPERKAPIRVKFEIPYFTVSGIQVRYLKIIEKSGYQALPWVRYITMAGEYELRLI

SEQ ID NO: 85 - protein, 428 aa, Ocimum basilicum
MAGAASALFLLDIKGRVLVWRDYRGDVSAVQAERFFTKLIEKEGDPETQDPVVYDNGVTYMFIQHNNVYLMTATRQNCNAASLLLFLHRVVDVFKHYFEELEEESLRDNFVVVYELLDEIMDFGYPQYTEAKILSEFIKTDAYRMEVAQRPPMAVTNAVSWRSEGIRYKKNEVFLDVVECVNILVNSNGQIIRSDVVGALKMRTYLSGMPECKLGLNDRVLLEAQGRATKGKAIDLDDIKFHQCVRLARFENDRTISFIPPDGSFDLMTYRLSTQVKPLIWVEAQVERHSRSRIEIMVKARSQFKERSTATNVEIELPVPPDATNPNVRTSMGSASYAPENDSLVWKIKSFPGGKEYMLRAEFRLPSITSEEAAPERKAPIRVKFEIPYFTVSGIQVRYLKIIEKSGYQALPWVRYITMAGEYELRLI

SEQ ID NO: 86 - protein, 428 aa, Ocimum basilicum
MAGAASALFLLDIKGRVLVWRDYRGDVSAVQAERFFTKLIEKEGDPETQDPVVYDNGVTYMFIQHNNVYLMTATRQNCNAASLLLFLHRVVDVFKHYFEELEEESLRDNFVVVYELLDEIMDFGYPQYTEAKILSEFIKTDAYRMEVAQRPPMAVTNAVSWRSEGIRYKKNEVFLDVVESVNILVNSNGQIIRSDVVGALKMRTYLSGMPECKLGLNDRVLLEAQGRATKGKAIDLDDIKFHQCVRLARFENDRTISFIPPDGSFDLMTYRLSTQVKPLIWVEAQVERHSRSRIEIMVKARTQFKERSTATNVEIELPVPPDATNPNVRTSMGSASYAPENDSLVWKIKSFPGGKEYMLRAEFRLPSITSEEAAPERKAPIRVKFEIPYFTVSGIQVRYLKIIEKSGYQALPWVRYITMAGEYELRLI

SEQ ID NO: 87 - protein, 428 aa, Phaseolus vulgaris
MSGAVSALFLLDIKGRVLIWRDYRGDVTAVEAERFFTKLIEKEGDPQSQDPVVYDNGVTYLFIQHSNIFLMTATRQNCNAASLLFFLHRIVDVFKHYFEELEEESLRDNFVVVYELLDEIMDFGYPQYTEAKILSEFIKTDAYKMEVTQRPPMAVTNAVSWRSEGVSYKKNEVFLDVVESVNMLVNSNGQIIRSDVVGALKMRTYLSGMPECKLGLNDRVLLEAQGRTTKGKAIDLEDIKFHQCVRLARFENDRTISFIPPDGSFDLMTYRLSTQVKPLIWVEAQVENHSKSRIEIMVKTRSQFKERSTATNVEIELPVPADATNPNVRTSMGSASYAPEKDALIWKIRSFPGGKEYMLRAEFRLPSIIDEEATPERKAPIRVKFEIPYFTVSGIQVRYLKIIEKSGYQALPWVRYITMAGEYELRLI

SEQ ID NO: 88 - protein, 426 aa, Solanum lycopersicum
MAGAASALFLLDIKGRVLVWRDYRGDVTSVQAERFFTKLIEKEGDPLDPVAYDNGVTYMFIQHNNVYLMTASRQNCNAASLLLFLHRVVDVFKHYFEELEEESLRDNFVVVYELLDEMMDFGYPQYTEAKILSEFIKTDAYRMEVTQRPPMAVTNAVSWRSEGINYKKNEVFLDVVESVNILVNSNGQIVRSDVVGALKMRAYLSGMPECKLGLNDRMLLEAQGRTTKGKAIDLDDIKFHQCVRLARFENDRTISFIPPDGAFDLMTYRLGTQVKPLIWVEAQVERHSRSRMEIVVKARSQFKERSTATNVEIELPVATDATNPNVRTSMGSSTYAPEKDALIWKIKSFPGGKEYMLRAEFTLPSITAEESVPERKAPIRVKFEIPYFTVSGIQVRYLKIIEKSGYQALPWVRYITMAGEYELRLV

SEQ ID NO: 89 - protein, 426 aa, Solanum tuberosum; identical to SEQ ID NO: 88

SEQ ID NO: 90 - protein, 426 aa, Solanum tuberosum
MAGAASALFLLDIKGRVLVWRDFRGDVSSVQAERFFTKLLEKEGDPQDPVAYDNGVTYMFIQHNNVYLMTASRQNCNAASILLFLHRVVDVFKHYFEELEEESLRDNFVVVYELLDEMMDFGYPQYTEAKILSEFIKTDAYRMEVTQRPPMAVTNAVSWRSEGIQYKKNEVFLDVVESVNILVNSNGQIVRSDVVGALKMRTYLSGMPECKLGLNDRVLLEAQGRNAKGKAIDLDDIKFHQCVRLARFENDRTISFIPPDGAFEVMTYRLSTQVKPLVWVEAQVERHSKSRVEILVKARSQFKERSTATNVEIELPVPTDATNPDVRTSMGSSTYAPEKDALIWKIKSFPGGKEYMLRAEFKLPSITAEEAVPERKAPIRVKFEIPYFTVSGIQVRYLKIIEKSGYQALPWVRYITMAGEYELRLT

SEQ ID NO: 91 - protein, 428 aa, Vitis vinifera
MAGAASALFLLDIKGRVLVWRDYRGDVSAVQAERFFAKLMEKEGDPESQDPVVYDNGVTYMFIQHNNVFLMTASRQNCNAASHLLFLHRVVDVFKHYFEELEEESLRDNFVVVYELLDEMMDFGYPQYTEAKILSEFIKTDAYRMEVSQRPPMAVTNAVSWRSEGIRYKKNEVFLDVVESVNILVNSNGQIIRSDVVGALKMRTYLSGMPECKLGLNDRVLLEAQGRSTKGKAIDLDDIKFHQCVRLARFENDRTISFIPPDGSFDLMTYRLSTQVKPLIWVEAQVERHSRSRIEIMVKARSQFKERSTATNVEIELPVPSDATNPNIRTSMGSAAYAPENDALLWKIKSFPGGKEYMLRAEFSLPSITAEEGAPERKAPIRVKFEIPYFTVSGIQVRYLKIIEKSGYQALPWVRYITMAGEYELRLI

SEQ ID NO: 92 - protein, 429 aa, Zea mays
MAGAVSALFLLDIKGRVLVWRDYRGDVSALQAERFFTKLLDKEGDSEVHSPVVYDDAGVTYMFIQHNNVFLLTAARQNCNAASILLFLHRVVDVFKHYFEELEEESLRDNFVVVYELLDEMMDFGYPQYTEAKILSEFIKTDAYRMEVTQRPPMAVTNAVSWRSEGIRYKKNEVFLDVVESVNILVNSNGQIVRSDVVGALKMRTYLSGMPECKLGLNDRVLLEAQGRATKGKAIDLDDIKFHQCVRLARFENDRTISFIPPDGSFDLMTYRLSTQVKPLIWVEAQIEKHSRSRIELMVKARSQFKERSTATNVEIEVPVPSDATNPNIRTSMGSAAYAPERDAMVWKVKSFPGGKEYMCRAEFSLPSITAEEGAPEKKAPIRVKFEIPYFTVSGIQVRYLKIIEKSGYQALPWVRYITMAGEYELRLI

SEQ ID NO: 93 - DNA, 2192 bp, Spinacia oleracea
  source 1..2192: mol_type = genomic DNA
aattagcaaattgattaccagctcttatgtcttaattcttttttttggtgcttcttatgtcttaattcttaatggtgtgtctgattaatgtataaacaaaatgcaatttataaaacaactatcaaatccccagaatattgggagcttattaaaactctcaaataaacggaaaatctgtgcgtttttccggcgcttgcatcttgattcctgctacaagactgacacatctgatctaatcttttctaacaatcgtgcaatagatgatcacatcaaatcagggtctttagactatgcccaccaactgttcgacgaaatgtctgttcgggatgttgtttcttggaatttgctaatttctgggtacaaacgctatggattaccagggaaagcgtttgaattgtattctgaaatgttatctcaaggttttgcagaaagcccatcaacgttttcttgtgttatgagcatttgtagtaacaatgggttttattttgaggggattcaagtacatagtagagtgatttcacttgggttttgtgggaacttgtacattgggagttctatcgttgatctttatgtgcaaatggggtttgttgatgatgggttgaaagttttgaatgaaatgtcagagaggaatgttgctgtttggaatttggtttttcgaggattttgtaaattgggtatgtgggatgagattataaggtgttttcctagagttaaatttgatggggttatgttgaatggtcttatggtttgttatttgcttcagggttgttgtaatgggaactttgtgattcaaggagaacagttgcactgcctagctctcaaggctgggttggttgaatcggatcggtttgttgctaatgcgttggtggatttttactctgcttgcgggactttgagtgacgctagcaaatcgtttgaaattattccttatgatgccgtgatttcatggaattcgatagtttctgcatatgctaatagtggggtgttgtctgatgcacttgaacattttgtgaggatgcactattggagtatgaaaccatctgtgcgttcatttgttgcgctcttgaattcgtgcagcaaaagtgagaatctttttttgggaacacagttgcattgttttgttctgaaactgggttttgattgcggaagcatccatgttcagtctgctctaattgatatgtatgggaaatgttacgagattgagagttcgtttaatatatatgaggagtgcacttgtaaaactatggagtgctgcaatgctcttttgacatctatgttacattgtagttatgctgaagaggtggttgagttgtttaaattcatgggttatgagggaattagatttgatgaattctccttgtccaccacactgaaagcattgtcgggatcttcctatatgagtttatcaagttgcacattgcttcattctcttgctattaaaattggattcgaatctcataacgtggtctcttgttcactaattgatacatattccaaattgggacaggttgatcattcacgcggtgtttttgagggtctatgttcacccaatgttgtctccttcacatcaattgtaaatggttatgcctgtaatggattaggaaaagagtgcctgaaattgctcgaagtgatgttccaaaagggtttaaaaccagatagagtgacgttcttgtgtgtcttgacagggtgcaaccattcaggtttagtagaggaaggaagaagggtttttgagtccatgaaatcactccatggtattgaaccagatccgaggcattattcatgcatggttgatctcttaggccgtgcagggttggtatgtgaagctgaagaattgttaaagctgtcacttataagggacagttctttaatgtggagctcattactgagaagttgtaggatacacaagaatgttgttgttggacaaagagttgcaaaacggttggtggagcttgaaccaggaaattctggagtgtgcctgcaagtctcaaacttttatcttgaagttggagattctgaattgtccatgcattacagagacatctggatagcaaggcaatcaggcagggagattggtcacagctttatcgtttgaattgtggtaatgtcacagaaagccgtgaaagtccatcaaattgcagcatttttatagaatagtacctgggtttttagagttttgatgagcctggaccaac

SEQ ID NO: 94 - DNA, 1992 bp, Spinacia oleracea
  source 1..1992: mol_type = genomic DNA
atgcaatttataaaacaactatcaaatccccagaatattgggagcttattaaaactctcaaataaacggaaaatctgtgcgtttttccggcgcttgcatcttgattcctgctacaagactgacacatctgatctaatcttttctaacaatcgtgcaatagatgatcacatcaaatcagggtctttagactatgcccaccaactgttcgacgaaatgtctgttcgggatgttgtttcttggaatttgctaatttctgggtacaaacgctatggattaccagggaaagcgtttgaattgtattctgaaatgttatctcaaggttttgcagaaagcccatcaacgttttcttgtgttatgagcatttgtagtaacaatgggttttattttgaggggattcaagtacatagtagagtgatttcacttgggttttgtgggaacttgtacattgggagttctatcgttgatctttatgtgcaaatggggtttgttgatgatgggttgaaagttttgaatgaaatgtcagagaggaatgttgctgtttggaatttggtttttcgaggattttgtaaattgggtatgtgggatgagattataaggtgttttcctagagttaaatttgatggggttatgttgaatggtcttatggtttgttatttgcttcagggttgttgtaatgggaactttgtgattcaaggagaacagttgcactgcctagctctcaaggctgggttggttgaatcggatcggtttgttgctaatgcgttggtggatttttactctgcttgcgggactttgagtgacgctagcaaatcgtttgaaattattccttatgatgccgtgatttcatggaattcgatagtttctgcatatgctaatagtggggtgttgtctgatgcacttgaacattttgtgaggatgcactattggagtatgaaaccatctgtgcgttcatttgttgcgctcttgaattcgtgcagcaaaagtgagaatctttttttgggaacacagttgcattgttttgttctgaaactgggttttgattgcggaagcatccatgttcagtctgctctaattgatatgtatgggaaatgttacgagattgagagttcgtttaatatatatgaggagtgcacttgtaaaactatggagtgctgcaatgctcttttgacatctatgttacattgtagttatgctgaagaggtggttgagttgtttaaattcatgggttatgagggaattagatttgatgaattctccttgtccaccacactgaaagcattgtcgggatcttcctatatgagtttatcaagttgcacattgcttcattctcttgctattaaaattggattcgaatctcataacgtggtctcttgttcactaattgatacatattccaaattgggacaggttgatcattcacgcggtgtttttgagggtctatgttcacccaatgttgtctccttcacatcaattgtaaatggttatgcctgtaatggattaggaaaagagtgcctgaaattgctcgaagtgatgttccaaaagggtttaaaaccagatagagtgacgttcttgtgtgtcttgacagggtgcaaccattcaggtttagtagaggaaggaagaagggtttttgagtccatgaaatcactccatggtattgaaccagatccgaggcattattcatgcatggttgatctcttaggccgtgcagggttggtatgtgaagctgaagaattgttaaagctgtcacttataagggacagttctttaatgtggagctcattactgagaagttgtaggatacacaagaatgttgttgttggacaaagagttgcaaaacggttggtggagcttgaaccaggaaattctggagtgtgcctgcaagtctcaaacttttatcttgaagttggagattctgaattgtccatgcattacagagacatctggatagcaaggcaatcaggcagggagattggtcacagctttatcgtttga

SEQ ID NO: 95 - protein, 180 aa, Spinacia oleracea
MQFIKQLSNPQNIGSLLKLSNKRKICAFFRRLHLDSCYKTDTSDLIFSNNRAIDDHIKSGSLDYAHQLFDEMSVRDVVSWNLLISGYKRYGLPGKAFELYSEMLSQGFAESPSTFSCVMSICSNNGFYFEGIQVHSRVISLGFCGNLYIGSSIVDLYVQMGFVDDGLKVLNEMPERNVAV

SEQ ID NO: 96 - DNA, 2192 bp, Spinacia oleracea
  source 1..2192: mol_type = genomic DNA
aattagcaaattgattaccagctcttatgtcttaattcttttttttggtgcttcttatgtcttaattcttaatggtgtgtctgattaatgtataaacaaaatgcaatttataaaacaactatcaaatccccagaatattgggagcttattaaaactctcaaataaacggaaaatctgtgcgtttttccggcgcttgcatcttgattcctgctacaagactgacacatctgatctaatcttttctaacaatcgtgcaatagatgatcacatcaaatcagggtctttagactatgcccaccaactgttcgacgaaatgtctgttcgggatgttgtttcttggaatttgctaatttctgggtacaaacgctatggattaccagggaaagcgtttgaattgtattctgaaatgttatctcaaggttttgcagaaagcccatcaacgttttcttgtgttatgagcatttgtagtaacaatgggttttattttgaggggattcaagtacatagtagagtgatttcacttgggttttgtgggaacttgtacattgggagttctatcgttgatctttatgtgcaaatggggtttgttgatgatgggttgaaagttttgaatgaaatgccagagaggaatgttgctgtttggaatttggtttttcgaggattttgtaaattgggtatgtgggatgagattataaggtgttttcctagagttaaatttgatggggttatgttgaatggtcttatggtttgttatttgcttcagggttgttgtaatgggaactttgtgattcaaggagaacagttgcactgcctagctctcaaggctgggttggttgaatcggatcggtttgttgctaatgcgttggtggatttttactctgcttgcgggactttgagtgacgctagcaaatcgtttgaaattattccttatgatgccgtgatttcatggaattcgatagtttctgcatatgctaatagtggggtgttgtctgatgcacttgaacattttgtgaggatgcactattggagtatgaaaccatctgtgcgttcatttgttgcgctcttgaattcgtgcagcaaaagtgagaatctttttttgggaacacagttgcattgttttgttctgaaactgggttttgattgcggaagcatccatgttcagtctgctctaattgatatgtatgggaaatgttacgagattgagagttcgtttaatatatatgaggagtgcacttgtaaaactatggagtgctgcaatgctcttttgacatctatgttacattgtagttatgctgaagaggtggttgagttgtttaaattcatgggttatgagggaattagatttgatgaattctccttgtccaccacactgaaagcattgtcgggatcttcctatatgagtttatcaagttgcacattgcttcattctcttgctattaaaattggattcgaatctcataacgtggtctcttgttcactaattgatacatattccaaattgggacaggttgatcattcacgcggtgtttttgagggtctatgttcacccaatgttgtctccttcacatcaattgtaaatggttatgcctgtaatggattaggaaaagagtgcctgaaattgctcgaagtgatgttccaaaagggtttaaaaccagatagagtgacgttcttgtgtgtcttgacagggtgcaaccattcaggtttagtagaggaaggaagaagggtttttgagtccatgaaatcactccatggtattgaaccagatccgaggcattattcatgcatggttgatctcttaggccgtgcagggttggtatgtgaagctgaagaattgttaaagctgtcacttataagggacagttctttaatgtggagctcattactgagaagttgtaggatacacaagaatgttgttgttggacaaagagttgcaaaacggttggtggagcttgaaccaggaaattctggagtgtgcctgcaagtctcaaacttttatcttgaagttggagattctgaattgtccatgcattacagagacatctggatagcaaggcaatcaggcagggagattggtcacagctttatcgtttgaattgtggtaatgtcacagaaagccgtgaaagtccatcaaattgcagcatttttatagaatagtacctgggtttttagagttttgatgagcctggaccaac

SEQ ID NO: 97 - DNA, 1992 bp, Spinacia oleracea
  source 1..1992: mol_type = genomic DNA
atgcaatttataaaacaactatcaaatccccagaatattgggagcttattaaaactctcaaataaacggaaaatctgtgcgtttttccggcgcttgcatcttgattcctgctacaagactgacacatctgatctaatcttttctaacaatcgtgcaatagatgatcacatcaaatcagggtctttagactatgcccaccaactgttcgacgaaatgtctgttcgggatgttgtttcttggaatttgctaatttctgggtacaaacgctatggattaccagggaaagcgtttgaattgtattctgaaatgttatctcaaggttttgcagaaagcccatcaacgttttcttgtgttatgagcatttgtagtaacaatgggttttattttgaggggattcaagtacatagtagagtgatttcacttgggttttgtgggaacttgtacattgggagttctatcgttgatctttatgtgcaaatggggtttgttgatgatgggttgaaagttttgaatgaaatgccagagaggaatgttgctgtttggaatttggtttttcgaggattttgtaaattgggtatgtgggatgagattataaggtgttttcctagagttaaatttgatggggttatgttgaatggtcttatggtttgttatttgcttcagggttgttgtaatgggaactttgtgattcaaggagaacagttgcactgcctagctctcaaggctgggttggttgaatcggatcggtttgttgctaatgcgttggtggatttttactctgcttgcgggactttgagtgacgctagcaaatcgtttgaaattattccttatgatgccgtgatttcatggaattcgatagtttctgcatatgctaatagtggggtgttgtctgatgcacttgaacattttgtgaggatgcactattggagtatgaaaccatctgtgcgttcatttgttgcgctcttgaattcgtgcagcaaaagtgagaatctttttttgggaacacagttgcattgttttgttctgaaactgggttttgattgcggaagcatccatgttcagtctgctctaattgatatgtatgggaaatgttacgagattgagagttcgtttaatatatatgaggagtgcacttgtaaaactatggagtgctgcaatgctcttttgacatctatgttacattgtagttatgctgaagaggtggttgagttgtttaaattcatgggttatgagggaattagatttgatgaattctccttgtccaccacactgaaagcattgtcgggatcttcctatatgagtttatcaagttgcacattgcttcattctcttgctattaaaattggattcgaatctcataacgtggtctcttgttcactaattgatacatattccaaattgggacaggttgatcattcacgcggtgtttttgagggtctatgttcacccaatgttgtctccttcacatcaattgtaaatggttatgcctgtaatggattaggaaaagagtgcctgaaattgctcgaagtgatgttccaaaagggtttaaaaccagatagagtgacgttcttgtgtgtcttgacagggtgcaaccattcaggtttagtagaggaaggaagaagggtttttgagtccatgaaatcactccatggtattgaaccagatccgaggcattattcatgcatggttgatctcttaggccgtgcagggttggtatgtgaagctgaagaattgttaaagctgtcacttataagggacagttctttaatgtggagctcattactgagaagttgtaggatacacaagaatgttgttgttggacaaagagttgcaaaacggttggtggagcttgaaccaggaaattctggagtgtgcctgcaagtctcaaacttttatcttgaagttggagattctgaattgtccatgcattacagagacatctggatagcaaggcaatcaggcagggagattggtcacagctttatcgtttga

SEQ ID NO: 98 - protein, 663 aa, Spinacia oleracea
MQFIKQLSNPQNIGSLLKLSNKRKICAFFRRLHLDSCYKTDTSDLIFSNNRAIDDHIKSGSLDYAHQLFDEMSVRDVVSWNLLISGYKRYGLPGKAFELYSEMLSQGFAESPSTFSCVMSICSNNGFYFEGIQVHSRVISLGFCGNLYIGSSIVDLYVQMGFVDDGLKVLNEMPERNVAVWNLVFRGFCKLGMWDEIIRCFPRVKFDGVMLNGLMVCYLLQGCCNGNFVIQGEQLHCLALKAGLVESDRFVANALVDFYSACGTLSDASKSFEIIPYDAVISWNSIVSAYANSGVLSDALEHFVRMHYWSMKPSVRSFVALLNSCSKSENLFLGTQLHCFVLKLGFDCGSIHVQSALIDMYGKCYEIESSFNIYEECTCKTMECCNALLTSMLHCSYAEEVVELFKFMGYEGIRFDEFSLSTTLKALSGSSYMSLSSCTLLHSLAIKIGFESHNVVSCSLIDTYSKLGQVDHSRGVFEGLCSPNVVSFTSIVNGYACNGLGKECLKLLEVMFQKGLKPDRVTFLCVLTGCNHSGLVEEGRRVFESMKSLHGIEPDPRHYSCMVDLLGRAGLVCEAEELLKLSLIRDSSLMWSSLLRSCRIHKNVVVGQRVAKRLVELEPGNSGVCLQVSNFYLEVGDSELSMHYRDIWIARQSGREIGHSFIV

SEQ ID NO: 99 - DNA, 2867 bp, Beta vulgaris
  source 1..2867: mol_type = genomic DNA
ttcctcatgagagcctaacaagcaatttaaaaactagcccttgtgcaattaattaacgtgccaattaatgcaacatataaaacgactatcatatgccacacaaattgggcgactaaaattcccaaattactggaaaatatgtgcattttcccgtttcttgcatcttgattcctactataacactgatgcttctgagctaatcttttcgtacaatcgtaccatagaaaatcacatcaattcagggtctttagcctttgcccaccaactgttcgatgaaatgtctcttcgagatgccgtttcttggaatttactaatttctgggtacaaacgttatagaattccggacaaagcgttagaattatatactgaaatggtatctcaaggtttcagagaaaacccatcaacgttttcctctgttatgagcatttgtagcaatggtggatttctttttgagggggttcaagtacattgcagagtgatttcacttgggttttgccgaaatatgtatattgggtgttccattgtggatctttatatgcaaatggggtatgttgatgatgggttgaaagctttggatgaaatgcctgaaagaaatgttgctgcttggaattcggtttttcgtggattttgtgtattgggtttgtgggatgagatcataagacagtttcctagagtgaaaggtgatggagttgaattgaatgaacttatggtttgttatatgcttcagggttgttgtaatgggaactttgttagtcagggacaacagttgcattgtcatgctttcaaggctggattggttgaatcaaatcgtttcgttgctaacgctttggtggatttttactctgcttgtggaactctgagtgatgctcagaaatcatttgaagttattcctcaagatgctgtgatctcatggaattcaattgtttctgcatatgctaataatgggatgttgtttgatgcacttgagtgttttgaggcaatgcaatattggagtatgaaaccatctgtccgttcacttgttgcgttaatgaattcatgcagcagaagggagaatctttcattgggaagacagttgcattgttttgtcctgaaacttggttttgatcgtggaagcatccatgttgtctctgctctgattgatatgtatgggaaatgctatgagatggggacttcgtttaatgtatatgaggagtgccattataaaactatggagtgttgcaatactcttttgacatctatgttacattgtacttatactgaagaggtggttgagttgtttagattcatggttgatgaggtaattgaatttaatgaattctccttgtccactacactgaaagcattatcaggatcttcctttgcgggcttagcaagctgccaattgattcattctcttgctattaaacatggatttgaatctcatatcgtagtctcatgttcactaattgatatatattcaaaatttggtcaggttgatgattcaaactgtgtttttgaaggtttactttcacacagtgttttctcctttacatcaattataaacgggtatgcccggaatggcttaggaagagaatgcctgaaattactcgaagttatgcttcagaagggtttaaaaccagatagagtgacattcttgtgtgtcttgacagggtgtaatcattcgggtttagtagaggaaggaagaaaagtttttgagtccatgaatacactttatgatattgaaccagatcagaggcattattcatgcatggttgatctcttaggtcgtgcagggttggtatatgaagctgaagagttgttgaagctatcatatgtaaaagataattctttcatgtggagctcactgctgagaagttgtaggatacacaagaatgacgttgttggacaaagagtagcgaaacgcttgatggagcttgaaccgggaaattctggagtgtatatgcaagtttcgaacttttatcttgaagttggaaattctgaaatgtccatgcattacaaagaaattgggaaggcaagacaattggttagggagatgggccgcagcttcatcgtctgaattgtggtaatgtcacataatcagccatgaaaagcctaaaaggcaatctaattgcaacattgaatataatttgaatataacaagaataaattgcatttctatataaaatggtaccagcatattcacaagcttgaaccaactatccatcttagaaaaagaaagatttctggaaagtagcaccccagaatagtttggtagggtatcaattagttaaatggttgaccataacttattcttattgttttatccattttttggttctctattgtgatttatccttttgcatcacactcgtatctttacagttggtattgagattgcctgaaaatgataaaaagtaatatatatataatcaggtgctagtggagagcccttgaactttttgactggtgagtctacagtctctgttttaagagtaaagcaaagatatgtaaaagaattttcacttatacttcaagtgtaggcatggagaaagtgttgcatcttcatctactttcaagtcaagccaatttttttttacaaatctcttgattttgaatgctaatctgtgcatataaatgcaaacccggtatcggctcataaattatccaagtctaataattttctaaatcatacaaaactcacaaaatatggaaatattctttgttcttttccttagcttattgatcacggctcatgggactgcggaatatgagctacaggacaacattgctgtgtttgcagaactcgaaagcttcgacatatatgaagaaatagaagatgaagtagaagcttttggaatgccttcatggactagttcaaatgctgcgcg

SEQ ID NO: 100 - DNA, 2565 bp, Brassica oleracea
  source 1..2565: mol_type = genomic DNA
gtgaagacattgcttgatacttgttgagcaaggagatgaaaaagattgaatttttaaagttatatattgaatcaaatgcgaattggcggctgtaagagagacattactgtgtcggagacatgcgaggagctcaagctttaaacttccttcgcaaaacaacgacgctagctcaacacatacgttctacggcggcgactcgtttggagtttggttcgtgtctcgaagcaaaccctagcgacctagtttatacccataactgcaaaatcgatgatttgttaaaatccggtgacctaatatctgcacacgaggtgttcgatgaaatgtccctacgagatgtcatcacttataatctgatgatatctgggaacagccgaaacggatgttctgtaaaagctttcgagctctacgcggagatggtctctcatggtcttagagagaacgcttccacgtttccttctgttcttagtgtatgtagtggtgatgaatggttatgcagagaagggattcaagttcactgcagggtgatctcgcttgggtttgagtgtaatatgttcattaggtctgcacttgtgggtctctatacttctttgcggctcgtttatgttgctctcaagctgttcgatgaaatgcctgagagaaacttagctgtttgtaatttgatgctgagatgttattgcgagaatggagattcgaaggggttgtttggagtgtatcgtaggatgggagttgaaggtgtcgatgagaacgggttgagttattgttatatgatccgtggttgttctaatgatcggttgttatgcgaagggaagcaattgcattctctagtggttaaatctggttggaacgtttgtaatatatttgtgggtaatgcgcttgtggacttgtactctgcttgtggtgatttatacggttctaagacatcatttgatgatgtccaggaacaggatgtgatatcgtggaactcgattgtttctgtgtttgctgattacgggtctatgcttgagtctcttgatttgtttagaaagatgcagttttgggggaagagaccttcagtgaggtcattcatgtcgtttttgaatttctgtagcagaaacagtgatactcagtctgggaagcagatccattgttatgtcctcaaaatgggatttgatgtttctagtgttcatgtgcagtctgctctaattgacatgtacggcaaatgcaatgacattgagagttctgtgtctgttcatcagagtctgcctcgcctgactctggagtgttgtaactcgctgatgacttctcttaggcactgcggcatcactaaagatatcatcgagatgtttggtttgatgattgatgaaggaactggaatcgacgaagtcactctttctactgtcctcaaggctttatcactctctgaagcagtaacttcacagagctgcacgcttgtacattgctgtgccatcaaatccggatacgcatctgacgctgcagtcttgtgctctctaatcgatgcctattcgaagagcggcgagaatgaagtgtctcggaaggtgtttgatgagattgattcacctaacgtattctgctggacctcgatcatcaatggatatgctagaaatggcatgggaagagactgtgttgagatgctgaaagaaatggatggaaagaatctcgtaccagacgaagttacaatcttgtctgtgctatcaggttgcagtcactctgggcttgttgaagaaggtgaagtgattttcaactcattggagtcgaagcacgggatagtcccaggaaggaaactgtatgcgtgcatggtggatttgctaggccgtgctggtttggtggaaaagggcgagaagctgcttcttaaggcacgtggagatgcagactgcatagcgtggagctcattgctgcagagctgcagggttcatggaaacgaagcaataggaagaagagcagcggaggttttgatggatcttgaacctgacaacttcgctgtttacattcaagtttctaagttttactttgagattggtgactttgaaatctccaggcgaatcagagagattgctgcctcacaagagctcatgagagagattggttacagttcagtcatcttgagaaactgataacggaggacagtaatttgcttcagcttcatgataaagaagagtgtacatatgtgaaatgggttcttttacttgaagccaccacacatgatttgacaacactctacaagcacaagacgcaaggataagattctttatttgcctggttggtccaataaactcatttgacctcttctataaaatcattttatgttcgttagatcttaaaatagcatcttgaggtttaataattgagaaatattcagcgacttatttctcgttttgtttatttcagatctcatgggaccaacatgcatcaagaacaagttgaccacaaaggttttgtgttgtagaggttttggagtaaagcaaagaagtggaaaagaacatgacttgtgctttaagcgtagatattgtagaaaaacaaggcttcttcttcttcttcatgtacttttaagccaagccaataaacccc

SEQ ID NO: 101 - DNA, 1797 bp, Capsicum annuum
  source 1..1797: mol_type = genomic DNA
atgcctaaacgtgatgttgttacatggaatattatgatttctggatatagtcataatcggtttccaagaaaatcgctacgcttgtataacaaaatggtttctcaaggtatcaaggagaattcatccactttctcttctatgttaagcatatgtggtaatgctggtttatacaaagaagggattgagattcacagtagagttgttgttttgggatttagtatgaacatttatattgccagtgcacttgttaatatgtatatacaaatgggtcttagggatgttgccttcaaattgttttatgacttacctaaacgaaacttacctgtgtggaacttggttttacgtggaatttgtgaattgggtgggtccagtactgagttcttaaggttgtatagtgatatgaaattggagaatgtggagccgaatgggcttacatatagttatttgattcatggttgttgtaaaaagagacttcttgataagggtacgcagctgcattcacatgtaattaagacgggatggttagaatcaaatgtctttttagctaatgcattggtggatttttactctgcttgtggcattttggttgatgccgataaagcatttgaatgtattccacgtcaggatgttattacatggaattcgatggtttccgtctatgctgccaatgatttattccatgaagctgtgcgagtcctagaagagatgagattgtgggacaaacatccatctgctatgtctttcatagcattgttgaatttaacaagccgcagaaaggaactgctattgggaaaacaaatgcataattttgttataaaattgggtttagattatggaagtgtcctcattcagtcggctttgattgatatgtatgggaaaaatcatgacattcaaagttcaattactgcattccagtgtacccgtgagacaagtctcgaatgttgtaattcaatgatgacatctttgctgcatcttggtttcttccaagatgtgtttgagatttttagtcggatggtttgtgaaaatattgtgtttgacgaggtgagtttgtcctcaacaataaaggcattatcattgttatccactcctaacttggataactgtgcgttgttgcattgttgtgcaataaaatcaggttttgattctgatagtgttgtcttatgttctctgattgatgcatattcaagatccggacatcttagattctctcagcagacatttgaagcacttccctcacctaatatcatcggtttcacttcaataatcaatgcatatgctcggaaaggtatgggaagtcaatgccttgcagtgtttgcagaaatgatccaaaagggtctaaaaccagataaagtaacgttcttgtgtatactgttgggctgcaatcattcaggtctagtcgaagaggggaaaaagatttttgaatttatgagaacttttcatgaggtctatccagacaggcggcactattcatgtatggtggatcttctaggccgtacaggtctactcaatgaggcagaagagctgctaatgtctgcatcatcgtcaggagattctatcatgtggagctcacttttgcgaagttgcaggattcatcaaaatgagcatgttggaagaagagcagctaaaaggttaatggatcttgagctagaggatccttctttttggttacaggcctcaaatttttattttgaaattggggagttcgagactgccgtatatattagagaggtcgcagtggcgaggaagatgagcagagatattggctatagtttaattcgggtgcatgagttccattaa

SEQ ID NO: 102 - DNA, 10909 bp, Chenopodium quinoa
  source 1..10909: mol_type = genomic DNA
tttcatgtcaatatctatgctaatgcttgtcatttcccaaatacctcatttccttcacaaaattctatacaatccattaataaagcattttagaggtggtattatgtggtaatgaaaatttgttaaaaaaacaaaaaaaagactaaaagcacatttttctggcagaatttctttggaaaatcatatacaaactcattatcattctcacaatttatgaccactcaccaaacatgttgtgagagtaaatgatagattgaggctatttaagtgctctaaaacaaagagttaaggcacccaagaagacaaaaacgggccctcctcctagaacttaagtacctcattgtgccttacactctttggttgggttccactgattaaacccttagaatgagaattaatatactatcatttatttcaaaataggattgcttgataaaattacaaatcgattttcttaaaaaagtttggtttatgtttaatgttcgatatatgatgatatacttggcaatcaactaaaatactagccccccaaaatctcgttataattgtatttaatattaaatgtgactaatgtaccaaaacaaaaaacgtattaagtgacatcttgttctagttccaataaaaagtacgaagtatgtattttcgttatttaaaaaaaaaagaaaaatcgaagtatgttttaccatacccatagtaccttactaaaatacgtaattatacataataatggtaaaaacatccctaaaaaatatttagatctagcaactttactagtattttttttctagggaacattataagtattttaggacaaaatgagatactttgtatacagagtagtaatattcacaccttgttaccactaggaattaaacaagaaaaaataaaagtacacatgttttcctccattttaataagttcttgataataagaggttaattaaagattgttttagagccttaaaaggaaaaagaattcctaatccttttaagttaatgctattatcgtgtgtattggtgtgtcatgttcgcatgttactcatatctgttaattttataaattaaatgcccaaattattgggagttttatgccggaaagtccctgcaattttccggcgcttgcatcttgattcctactataagactgacatttctgagcttatcttcttaaacaatcgtgctattgacaatcacatcagatcagggtctttagcctctgctcaccaactgttcgatgaaatgtctctgagagatgttgtttcttggaacttgctaatttctgggtacaaacgctatggaatgccagtaaaagcgtttgaattgtattctgaaatggtatttcagggttttagtgaaagcccatcaacatgttcctctgtcatgagcatttgtagcaataatgggttttattttgagggaattcaagtacattgtagagtgatttcacttgggttttgtgggaatttgtatattgggggttcaattgtggacctatatatgcaatcagggtttgttgatgatgggttgaaatttttggatgagatgcctgaaaggaatgatggtgtttggaattcggtttttcgtggattttgtaaattgggtttgtgggatgaggttataaggcagtattcaagagtgaaatttgatggggttgtgttgaaagatcttatggtttgttatttgcttcagggctgttgtaatggaaactttgtaattcaaggagaacagttgcactgtcatgctctcaaggctgggctggttgaatcgaatcggtttgttgctaatgcattggtggatttttactcagcttgtgggactctgattgatgctctgaaatcatttgaagttattccttataatgctgtgatttcgtggaattcaattgtttctgcatatgctaatagtggggtgttgtttgatgcacttgaatgttttgtgcggatgcagtactggagtatgaaaccatctgttcgttcacttgttgcgctcttgaattcgtgcagcaaaagtaggaatctcgttgtgggaagacagttgcattgttttgctctaaagttaggttttgattgtggaagcatccatgttcagtctgctcttattgatatgtatggaaaatgttacgagattgagagttcatttaatatatatgaggaatgcttttataaaactagggagtgctgcaatgctcttttgacatctatgttacattgtacttgtgctgaagaggtggtcgagttgtttaaattcatggttgatgaggggattgaatttgatgaattctccttgtccactgcactgaaagcattgtcaggatcttcttttgtgagcttaacaagctgcacattgcttcattctcttgctataaaaaatggattagaatctcatattgtggtttcatgttcactaattgatgtatattccaaattaggccaggttgatcattcacacagcatatttgagggtttacgttcacccaatgttgtctcctttacatcaattataaatgggtatgcccggaatggattaggaagagaatgcctaaaattgctcaaaatgatgttccgaaagggtttggaaccagatagggtgacattcttgtgtgttttgacagggtgtaatcattcaggtttagtagaggaaggaagacgggtttttgagtccatgaaatcaccccatggtattgaaccagatcaaaggcattattcatgcatggttgatctcttaggacgtgcggggttggtatatgaagcggaagaattgttgaagttgtcttttgtaaaggatgattctttcatgtggagttcactgctgagaagttgcaggatgcacaagaataaagttgttggacaaagggttgcaaaacgtttgatggagcttgaacccgaaaattctgcagcgtgtctgcaagtttcaaacttttatcatgaagttggagattctgaattgtccatgcaatacagagagattggaatggcaagacatttggttagggagattggtcacagctttatcgtttgaattgtggtaatgtcacagaataggccatgaatcttattgcaagatgttcatattttaaaaagtacaggatttgaatattttatttttgagctgcatttatatgaaataattacctgcattttgatgagcctgggccaactatccttctagaaagggaaagacttgggtagcctggaaagtatcatctagaagctgttctagtacggaagagttcagattaattatatagttgaccataacttattcttgatttatctatttctggttttatggcgtgtctgatccttttgtatcactcagatctttacagttgttgggtggtctgcttgatgatgccaaaaactatttctcctttcgtccctaatttataggcctcattttattgggttatttataaggattcaagctacaataccatcattgttgttattattttatttatgaattttttttgttattatttatagttatacatttccactacaccaatgttctctttcttaaaaaattagctaatgattttattacgggtaatatgggaaagtttgaaattacaatttttaaatctattattggaaggtctatgatagaaatgcatatatggtgctagtctgctagttggaggagttcatgagcttttttgactggtgaaactaaggtctactggtttaagagtaaagcaaagatatgtaaaagatttttcacttatacttgaagtgtaggcatggagaaagtgttggctcttcatctactttcaagccaagccagattttcataaatctcttcattttgaatgctaatcttgcatataaatgcaaacccagtgtctgctcctaaattattctactctaattttctaatcctgcaaaaactcacaaattatggaattattctatgttcttttccttagcttattaataacagctcatgggactgcagaatatgaggtacatgacaaaattgctatgcttggagaactcgaaagcttcgacatatatgaagaagatgagatagaagcttttgaaatgccttcatggaccagtacgaatgctggacatgttcttgtgaatgtcgatagctttggtgctaatggagatggaaattctgatgatacccaggtaatcctgatgcagcatgaactttattgattaataaatcttatacctgcatgtgtaagttctgacaatgctgctaaacttgtattttctatgaaaatattttcaggcctttgttagtgcatggaagcaggcttgttcttcacaaaaagcagtcctcttagttcctgaagggcgtcgttatcttgtcaacgcaacaaaatttgaaggaccgtgtgcaggcagattagttatccaggtaagtttttatccagaaatgtcaatatgtcaacgctccaatctagctgtgatatctgctacgttgatgtgaaccccatagaatgtaactatttctgatgagagttttttttggctactgttgtgtacttggtgtgcaggttgatggtacaatagttgcaccaggagagcccaaggactgggatccaaaattttcccggacttggttgaattttcacaacttaacaagtgttattttccaaggcaaaggggtgattgatggatctggcagtaaatggtggtctgcatcctgcaaaaagaacaagaccaatgtaactcgttgtcatcatctgatttttgtattaccgactgataaatttgattgtattgataagtatgtactaatccatctgtctgttttgtcaattttccttgatcctgcagccatgcaaaggagcaccaacagtacgtatcccttatcggctttatgttggaactatatgcatatttaattatttattttgcacggattgtgggttggttctacaatactctatttatgtgattctggaaaaatctagatttgattgtcatgttgtatgatggggttgttgaacttgcggttttgttaagcaagttatttgtagatcataattatcggaatctaaaggatgcaacaagctgataagttttttgttttttgtattttttattttatttttctgctgaaggcactgacaatagattcaagctctgctataagggtaaagggtctgactatccagaacagccaacaaatgcactttgttattgcccgttccaattctgtgcgagtatccaatgtgctagtttcttccccagaagacagtcctaacactgatggaatacatatcactgaatcaacaaatgttgctctcctcgactgtaaaatcggaacaggtattttgcaactttgagctgctccgtccttaaatgttgctgctaacataatctgaaccttttacaaatgaatacttgggataataagaggatcatattgtattgtgtcctttagtttaagactcaaagagtgctctgtaacctacattaaataaaaaaaagaaagtgtgcactatgttaaatatgcaccaaaaaacgttatttgattcaggcatgctaagactgctaactagctaaattttcgctgacacttgtacactaggggatgattgtgtttcaatcgtcaatgccagttcagctatcaagatgaagaagatttattgcggtcctggacatggaattaggtatttctttcaattattagatgttctaagttctaacaagttaatcattgcctctgtgatgtgacctcttaaatcttggcatattctgtatttcactaatctgatttgctactgcagcataggaagcctgggcaaggataattcaactggcattgtcacaaaagttgtcctgagtggtgcatttataaagggtgcaagtaatggactcagaattaagacttggcaggtaagcatttaaaaatcagatgtcatttccaactcccttcacaccccaccgccaacccccccacccccccccccccccctcccagttcccttctcaaataataaaaaaaagaaatggctttgatggggaacaaggtaagttcttgatgtgccatcccttctggtaaatttgagaacagaataatggaacagataattaagaaaacgatcatctcaaagagctgacttactgtgttggtgtaacatgacattgctgcgtgtacacggtagaagtaggactgcatgcattccttctctctcaagtttttaattgttttatgaatccttgctctaaaaattgaatttactttaaaattaaaatttttgtacaagctctggtactattattttttaaatctactttttgattcttcctttgagtttaaattatcagaacttgaatctctctccttgccttcttcatgcagggaggatctggttatgtcaaagcaatacgctttgaaaatgtgatgatggaagacgttgcaaatcctataattatcgatcaattctattgtgactctcccaatccttgtggaaaccaggtatatttaaggtgtccagtttttatttgctgttcagttagaaatatggtgtgtttcctgtttacgtaaactggtctcaagtgtcttccatacaaaaaacaaagttcttcctcgtttcttgtctaaaaaacagaatattagataatcctagacgtcattttcagaagtagggctaaggttttgcctcttttgttaagagaaaaaaaaatatatgcaatataacttagaaacgtgaaacatactttttatattcggaaaatatataaaactttgataagaagtaaaaatgaaaaagacattgaaactacagatgtgtcaatcaattgactagcacctattgcttagagcaagctgtcagctcgagaaggcaatctcttgaaaaagttgttaggaacagaaggcagcttgcttctgaacttcgggtgcctcagggtgtacagtcctgctactagagcaattactctgaatggagtcacataaagaagcacagctgcagaaagggagaacattatatataagctagtcgctcttggatcccgccagcttagcagggattggaatctctccccttgagtcgctaagtcacccaccactgtctgaattcttccagccacacttctaagccgatcatacctcatcctaatgatttcatgtggccttgaagtaggaaatgtgtcaaattcttcatcaagttcatctggatgtactgcttctgcccatgaaagtttgatatccatatgtggtgggttacgtgggcggaacctgtagttccatagaccaatgaaaaacatgtagaggcacatcgttggtagtatcaactctgggtaccatatcaatattaagaagagaatgtgaactaggactgtagtaatagggtttttccaatggcaaacatcaccaaaccaccggcttattgatattgtgcctgacaaaattgccataattctgaagaaattagctttgcttcttcgcatactccacaggtgggaatccacatctaacatgtattccaccacctcctttcttaatggcggttcagctctgcctagtctggctgccactatgttcatggcttggaatctaaggctgtctatttggtttactgtgaaagggtggaggtaatgcattttagggagtaagggatggccatacatgtaaatcatgttggccaaggataagctggtgaatctaactgctagctggagttctcccatcttcttcaccccacctggatgcagaacaaggagaggataggaatttgcataaacacgatgagactcaagtgtggatagtctgattcttacctttccaattcttgaatctctgactgaactaccagcagtaccctgcttctcagatccgcctaagtggcaattgtcaaacactcccaatgttattactgtacatgggtcataaacttcccatgtgtattgctcattccatttaggagcaaaagaatccagaatcgttctggtccgaacccatttctgaccatattttgccacacagtatgcatctgtggtgcttctgccatcctttgtcttcatgggaagaagaccttgagcacctaaaagacccatttccaaaattccgactggtggcttccaaagttgacgtgatgttgggcgcgtgtcactgacatacattgttgactcatccaatacatggtacccaccctcaaggcagactctgaggtgcatcctgctggaaaatttctgttccatcctcctgtcagattccaagactccaaatccgaatttctcaaggttgaaccaacgagaatgaactgttctgtggtctagccgcttctcaaagatgttgactggtagtattatcttgcctagcacatcatcttttgctggatgaacacgatcctcaacagtgaggactagctgctcctcaaagggctcggcaactacaaaaaccagatcctcattccaaagcggattcatggtgtttggtggacttatcttagtccgcaaaacttggttgccaacttgtattttcacaagaagctctggagctctgcttctatcatttgaaatcacatcctgagcttcaatcacattcactctcaggtaccataatttcggggtcatgtaaacttttgaacgaatgctaaataacccttctccctgaacaaaagctgtttctgtgtgccatgcctctggaaaggcttcatcagcttgcgtgcccatccaaacagccagcattacctcccccattaccttcccctgtcctcttcgatcttccagcctgtaccattgaggtgccaatgggctatcaggtgggaccctggttgggacctcacttaggtcaaacaccaccctccctatgtactcatccctccccaccatctctcgctcctttaaaaagacttccaatgtagatgcttggatgcggtcctttgagaaagcaaaaacctgattccactctggattccttttattctctaaatgcttggttcgccctttatagttccctagcttgacttctacataaggatcacagcttccagtgacaccactctggggaagatcttttgctttcaccactcgaacataaaggtagtatgtttgctcaacaagatcataagtactactgaacctctctccactattcatccatgctcgtccaccatagcctcctccattgggccaccgctctcccagctgagggttagcttcttttagcttgtagtcattgtcatggctgacggatcctcgttgttcttggccgatggatcctcgttgttcgtggccgacagagcctcgttgtttgatgcggatcatagctgttggaagttttttgggattgggagatggtttgtttttggtgttaggttagtttactctgaaacaaaggaagtagtggatgggtttttatggtcttacaaaggcaacgatttagaatgagtttctactgtggaacataagatgatttttttccctacacagttattatctgctgtgggtttacttcttttgtagatgtcttctatggatggtttgcagtgggatttgatttcatttagatggaagtgtagcaactggctgtaagtgaggttggtatattctgggagatatttggtttggcttctccggcaatgaaaactaacttttagtagtgttctagctggttctttgtgtgttagattatgggtgtgtatgattctaagctccagcttcatggtctttttactctcttgttgcacctgaaagaagctataaaggaatcagttctgcccaagaaatctgtaactcaattcacaagcaaggaagttatgcctaagaaaaggcaagcttaagcaaagaatctcaagggctgtagtgttacccttccctctctactaagacagcagtcctgctctgataagtgaacagaacagcggtttggtcaagaatccacgtgctactaatttaagctcttagatattgattaatttaacaatggtaaaacctttttagctattccagggaatgggaaattttgcttgtttgcttctttcttcattttattaaagggcaaaaaggtagccattccaatggcagtagtagtctaatgatgtgtctttccttttctttctttctttctgtctttctttcttacctttcccctttctcattgcgatcacattatcaattacctaatcttttcttgatttctctttttcttccttttcagtcgactgctgtgcaaataagtcaggtgatgtaccggaatattactggaactacgaagagcaagcaagccatgaagtttgcttgcagcgacacagttccttgcaagaacattgtcctcacgaacattgacttgcaccggacagaaggcacaacagagacatattgcaactctgtcactggttttggcttcggaacaatcaacccccctgctgattgccttacctccagtgacaaagattattccagtcctgatgacatgagaatttcccatcttggggaatcaatagaagatcacttagttcatacagagctgtgattttgcatcatattataggtacaaagtataacacttaagtattgagtttattaaatactcaaatggaattttaaatgatgtagaatacgtactttagggaagggtgtcacttcagacttggttttcaggtctaaaattttaacttttcctattttcttttttctaatttggattgtaatgatgcaatagaaatatcttattgataaatgattatttgttgttatagaaagattgtgtaatttaagtattttattccttaagaatttgaagtaccctgtgcaaccgtagcacaatttatgtacaaccttctatgtttccccaaattaattcacaaaactggaggtgtcaattcggatgatcgtatcgggtctgatgaggtcgggtcgggtcaatttttaaagttgagtcatgctaaattattgtgtccacgcgagttcaaatttaattcagataattgttccggtcggttt

SEQ ID NO: 103 - DNA, 2004 bp, Citrullus lanatus
  source 1..2004: mol_type = genomic DNA
atgcgaaaggtcaggaaattcgcctccttcgtccgaactattacaactgtaacatacgaatttgtagccacaacgccaccaatccatccaccacaaccatactcgcattcgggtgtgcatgctcgtgatgccatttaccttaagaatcgagaaatcaatgaagttataaaactgggccatcttgactctgccattaagttgttcgatgaaatgcctcttcatgacgttgttacatacaatttgctaatttctgggtgtcttcgcaatgggcacccagagcgcgcatttggtctatacagccaaatggttttacgagggattagagaaagtgcgtcaacatttacttcagtcttgggtacttgtagcaacattgattttttcaaagaaggaagtcaaattcactgcagggttgtttcttttggatttaccttgaatttgtttattgcaagctctctaattgatttctatatgagaatgggtcttcatactgtagctttgaaggtgtttgatgagctgccacaacgaaatatagctgtttggaacttgttgcttcgtcggtactgtgaactgagtcaattcgaaaagcttctgggacttttctcgaaaatgcaactggaaggtgtagagccaaatggtcttactttttgctatttgcttcgaggatttggtaatgagaggctcttagacgaagggaagcaactacatagtcgtgctgtaaagatcggattggttgaatcaaatatctttgttccaaatgctttggtggatttctactctgattgcagaagtttaacagaagcaaaaagagcatttgaatgtattccattagacgatgttatttcctggaattcgattgttgcagtttatgcagacattggtttcttgtcagaatcacttgagttgttttctcggatgcagttttgggggaaaaggccctcaattcggtcgttaatggctcttttgaatttatctagtcggacaaggaatatccagttggggaaacagattcaatcttatgccctgaaactgggttttggtcatgagagtagccaccttcaatcggctttgataaatatgtatggaaaatgcctcgatattgagagttcagtggccgtgtatgaaagtacttctgtgagaactttggagtgttgcaactctttaatgacatctttgttaccctgtggtatcattgaagatgtgatcgagatgtttggattgatggttgacgagagaattggacttgatgaggttactttgtccacaacattaaaagcagtatcgatgtcttctccatcagacttgaccagatgtagattgctccactgttgtgccataaaatcaggctttgattttaatttcgtggtttcttgttctttaatagcttcttattcaagatgtggtcatgttgagctctcttgcaaagtttttgaggaaatccattcccctgatgtcatttgtttcacctcaatcatcaatggatacgcccgtaatggactaggaagggagggtgttgaaatgctcaagacaatgatccagaaaggcctgaaacctgacaaagtgactttcttgtgtgcattgatagggtgcaaccattcaggactggtcgaagaaggaagatttgtgtttgagttgatgaaaaacctttacggaattgaaccagactggaaacattattcatgtatggttgatcttcttggtcgtataggtctgctggatgaggctgaaaagttgattcaaaaggtgcctgaaaaggttaacggtgtaatctggagctccatgttaagaagttgcagaatccatagaaatggaacaatcggaaggaaaattgcaaagtcgttggtggaccttgaagctgaagatcctgccattcttttgcaggcttcgaacttctattctgatattggagattatgaaacttcaaagcaacttagagaaattgcattgataaaaaaagttgtaagagaaattggtcatagtttaatagaggtaaaaagttactgttaa

SEQ ID NO: 104 - DNA, 2004 bp, Cucurbita maxima; identical to SEQ ID NO: 103
  source 1..2004: mol_type = genomic DNA

SEQ ID NO: 105 - DNA, 3213 bp, Cucumis melo
  source 1..3213: mol_type = genomic DNA
atttttatcggtgtagatttagaaagccgtcttctgttctctctgtggatgtggataactaatcatctcttggttaaaatacatcaacgacaatcctcttctttatgaacaacaatttaagcgcctgttattcggtccctcccgatcacggaccatatcaaacctttctaagttgtagagctagagcccttgttcaggtctctgataagcttaaactgtgatgcgaaaggtcactaaattcgcttccttcgtcagaactattactgctgtaaaatccgaatttgtagccacaacatcaccggtccatttaccacacccatattctcgtttgggtctgcatttccatgctcgcgatctcatttaccttaagaatcgagaaatcaataaacttataaaactgggccatcttgactctgctattaaattgttcgatgaaatgcctcttcatgacgttgttacatacaatttgctaatttctgggtgtcttcaaaatgggcatccacagcgcgcatttggtctatacagccaaatggttttacgaggtattagagaaagtgcgtcaacatttacttcagtcttgggtacttgtagcaacatggattttttcaaagaaggaagtcaaattcactgcagggttgttctttttggatttactttgaatttgtttattgccagctcgctaattgatttctatatgagaatgggtcttgatactatagctttgaagctgttcgatgagttgccgcaacgaaatatagctgtttggaacttgttgcttcgtcggtgctgtgaactgaggcaattcgaaaagcttcagggatttttctcgaaaatgcagttggaaggcgtagagccaaatggtcttactttttcctatttgcttcgaggatttggtaacgagaggctcttagacgaagggaagctactacataaccgtgctgttaagatcggattggttgaatcgaatatttttgttcaaaatgctttggtggatttctactctgattgcagaagtttaacagaagcaaaaaatgcatttgaatgcattcaattagacgatgttatttcctggaattcgattgttgcagtttatgcagacatcggtttcttgtctgaatcacttgagctgttttctcggatgcagttttgggggaaaaggccctcaattcgatcgttaatggctcttttgaatttatctagtcggacaaggaatatccagttgggaaaacagattcaatcttgtgctctgaaactgggttttggtcatgagagtagccaccttcaatcggccttgataaatatgtacggaaaatgccttgatattgagagttcagtggccgtttatgaaagtatttctgtaagaactttggagtgttgcaactctttaatgacatctttgttacactgtggtgtcattgaagatgtgatcgagatgtttggattgatggttgacgagagaattggacttgacgaggttactctgtctacaactttaaaagcactatccatatgttcagctgacttgagcagatgtagaatgctccactgttgtgccataaaatcaggctttgaatttagctccgtggtttcttgttctttaatggattcttattcaagatgtggtcatgttgagctctcttggaaagtttttgaggaaatccattcccctggtgtcatttgtttcacctcgatcatcaatggatatgctcgaaatggactcgggagggagggtgttgaaattctcaagatgataatccagagaggtctggaacctgacaaagtgactttcttgtgtgcattgatagggtgcaaccattcaggactggtcgaagaaggaagatttgtatttgagttgatgaaaacctacagaattgaaccagactggaaacattattcatgtatggttgatcttcttggtcgtgcaggtctgctggatgaggctgaaaagttgatccaaaaggtgcctgaaaaggtcaacgatgtaatctggagctccatgttaagaagttgtagaatccatagagatgaaacaatcggaaggaaaattgtaaggtcgttggtggacctcaaagctgaagatcctgccattcttttgcaggcttcaaatttctattctgatattggagattttgaaacttcaaagcaacttagagaaattgcattgacaaaaaaagtggtaagagaaattggtcgcagtttaatagaggtaaaaagtcattgttaacttgggacttctgcatagtggaatcaatagcgcggacaaactgctacaactgagtacagtgatgccattgcctgccacctggaggtttctttcttggatctttggaaggttagttttaggatattgttaatcagttgaatattagttcactgttggttattctcttaaagatagtggcttcttgcctcaaaaccagcacctcttcctgtggatacataaaactacgagccgaatatagcaactaacttgaggatccttcctcctgtaggtgtctcattggatgattattatatcttatcgttagtcgccctgacatcatgtttgcagtacttaagctcggtcaatatgttgcaaacccgagacagtcacacttgacagcagctcacacttcgcttcggtatctcaaagctcctggacaagggattttcctataagctttaaggtcctttcagattagtacctttagtgatgctgattgggcttcttgccttgatactcataagtgtaaatccagattttgtgtatttttcagtgattcttcggtctcatggaagtcaaagaagtaaacaacagttttgcgttcatctgctgaggctgaatacagggaattggcagccactgtcggtgaagtttcttggcttgtccgattacttaaagaacgaagtacatcgagcttgactgccattttatctgtgaccatgtagcaaaaggagatatcagactgacgtctattcaaagttcttcccagcttgctgacattttcaccaaggcattaccttcatgttcttttaaacttctgttgtccaagatgggaattttgaatatcttaactccatcttgagggggagtttttaggatattgttaatcagttgaatattaattctgttattggtggctaaatcatggccacctcacatttcgtaactccaattgggtatttatattgccatttctcactaatgaagattacggcaagttttattttctc

SEQ ID NO: 106 - DNA, 6650 bp, Cucurbita pepo
  source 1..6650: mol_type = genomic DNA
tgaaacttggatttgtgtatgtagggctgcatcctatttacacaatcttcgttcttttttatcaacgctggaaccgccaagttctaaagccattcgtcggggctcggagaagctgaaactgtgatgcgaaaggtcagggaattcgcctccttcgtccgaaccattacaactgttacttccgaatttgtatctatccatttaccacagccatactcgtatttgagtgtgcacgctcctgatgccatttaccttaagaatcgagaaatcgatagactcattaaatttggccatcttaatgctgccattaaattgttcgatgaaatgcctcttcacgacgttgttacgtacaatttgctcatttctgggtgttttcgccatgggcatccagagcgcgcattaggtctctacagccaaatggttttacgagggattagagaaagtgcgtcaacatttacttctgttttgggtacttgtagcaacacggatttttccaaagagggaagtcaaattcactgcagggttgtttttcttggatttagtttgaatttgtttattggtacctctctaatcgattactatatgagaatgggtcttgatattgtcgctttgaagctgtttgatgagttgccgcaacgaaatatagctgtttggaacttgttgcttcgtcggttttgtgaactgggtcaattcgaaaagcttctgggatctttctcgaaaatgcaattggaaggcgtagagccaaatggtctaactctttgctatttgcttcgaggtgttggtaacgaaaggctcttagacgaagggaggcaactacattcccgagctgttaagatcggactggttgaatcaaatatctttgttccaaatgctttggtggatttctactctgattgcagaagtttaacagaagcaaaaaaagcatttgaatgtattccattagaagacgttatttcctggaattcgattgttgcagtttatgcagacatcggtttcttgtcagaatcacttgagttgttttctcggatgcagttttggggaaaaaggccctcaattcggtcgttaatggcttttttgaatttatctagtcggacaaggaatatccagttggggaaacagattcaatcttgtgcgctgaagctgggttttggccatgagagtagtcaccttcaatcggctttgataaatatgtacggaaaatgctttgatatcgagagttcagtggccgtgtatgaaagtatttctgtgagaactttggagtgttgtaactctttaatgacatctttgttacactgtggtgtcattgaagatgtgatagagatgtttggattgatggctgacgagggaattggacttgatgaggttactttatccacaacgttaaaagcactatcaatgtcttctccaacagacttgaccggatgcagattgctccactgttgtgccataaaatcaggtcttggatttaattccgtggtttcttgttctttaatggactcttattcaagatgtggtcatgttgagctctcttgcaaagtttttgaggaaatccattcccctggtgttatttgtttcacctcaatcatcaatggatatgcccgaaatggaatggggaaggagggcatcgaaatgcttaagacgatgatccagaaaggctggaaacctgacaaagtgacgttcttatgtgcattgatagggtgcaaccattcagggctggtcgaagaaggaagatttgtatttgagttgatgaaaaccgtttgcggaattgaaccagactggaaacattattcatgtatggttgatcttcttggtcgtgtaggtctacttgatgaggcagaaaagttgctgctaaaggtacccgagaaggtcaacggtgtaatctggagctccatgttaagaagttgtagagttcatagaaatgaaacaatcggaaggaaaattgctaagtcgttggtggatcttgaagctgaagatcctgccgctcttttgcaggcttcaaacttctattctgatattggagattttgaaacttcaaagcaacttagggaagttgcattgacaaaaaaagtgataagagaaattggtcacagtttaatagaggtgaaaggtcattgttaactgctacaactgagcgtcagtgatgccttgaggtttatttcttggatctttggcaggtacgatctttacttactatgaagctgattccaagccattttattggccttattccttgagacggggtttcctggtgttgcttgacactgaggaaaaggtacgcgtgctagtatctattgataggatcagtttagcagatgaacatatttttctcctcggtggtgagcattatcaatagcttcgtggttgcaccttagaggttcgtgtctgggagtggtacatgttatatcttcttcattgtcttcatgaactggttagttattatttgatctggaagatactacaaaatgtaactgtttagtttatgattttttttaatccaacgtattcttttttatttccatcactgtaatttgtaagatgtgtaaattttagctcgatggacagaatttgtggcaccagtttattctctcagctggatttgcaggtccctcggctgtgacttgatgtttggttaatggtgttgcattgaggggatgtggcgtcattggtggttttggaagcaaatggtgagcagcatcattgtgtcttaaataaaaagaaaagagagataaatacatccaacatttttgtcagaatgtttgatatcttgcgctcccccgtttactttgcagaggactatctacagcagaaatatatttttcagaatcataaattagtttaaaaagaagaagaagaagaagaagaagaggatcgtaatattgtagaattgggcagcaaatacaagtggtcttgattcgagatatggaccatggatcaatctccaatccaaagctaaaagcatcatctggatcagcccacggatgcaatttgtcaatacttggcctgaattcctggggttttctcgagtgtacaagtcacagctgagacaacagctgatgaaattcacgtctctggatcaacaaatgcatttgtacagcaagatacgaacaggttcttatccttcttaaatttctgtaataaaaaaattaatgaccgtgacagtatgcttggatgtgtggcgtggtggaaaagggaaataaaatgaagccgactctgcaactaaaatggaattaagtcacatgacataggagtgctaatagaaatggttaactaaaaaactgcatgaacatagaactgtctaatagttgtctaagaaggctaagtgactgacatgactagttcattaaccaaaacattggtcacatgtatataacataagaattttgacaacatttagccgtagctaatggaattgtaaattcgagggaccagccaataacaaagcacaatctaagcacccaaagttaaaatcgtttgattgagaggcaattgaaataaacaagtgaattaaaaaatatattaccatcaaaacgtctacggactggggtggtgagaagaattatattgtggcttgaagagggtcagagtcgtccctgtcaaacccattctttgaaataggcttgaaggcacattgtagactacctgaagtgtcaaaataggcttcacaatttatccttgtgaacaatgataaagactagatgtgagttccttagatttatatttgaacaacaccatctccataaaacatgattttgaggcttacggacaacgaatcctcgcgaacgaagaacaggtgaaaagtagattcctagacgagtaaggctgaattagttagggatttaaaataaacaaaatgcatgttgaattcagttgtacatataatcatataattaattaaaacgacacaaaggactggatctaaaattaaagtaggcatttaggaaatttgatttatctacgatgttattatgtactatctctgtctaattgatccctgcatacatttttttagtatcaagtagtagctgttgtgtcggttctctgacttagtttaaactggctgtaactatcgttttgattcatcttggacattgaaattatagaagaaattgaactttttacccattgatgtgacacttctctatcacaatacttatcgaaagattcttttagcatctccaaattttctttggtatattttccttccatcagagtagctctaagttttcacgtgagttttgttctgccagtgaactgatacaagctttccatgattttgacaaactgaaatgaatttgggagatagagaggcccctatgaagtagactccacaaatttcttcccatttaagtctcgtgaaaccttcagctaaattttctaccaaattattatggtggagtgcagtttgtccacttattgaattttttaagagcaaatcctacatttatggatggattactaattcatatgagttgagtactttgtagtccaatagcttaggttaacttttaaattggcttttaagcatttgaaaaaccattccaaacaagctcgtaatttaaaaaagtctcgagattgtggggacattattggtggagggatggtctgtgtggagaaatgtagatgttgaggtgagaaagaaagaacaaaagaaaatgatgaaaagattgaatgtgactatagcttatgcgtcatgtggcttggcctgctgcagtattgctcattacagagatcacaccacaaatttattaatacacacttctgtctctcttcctagccctcagatcttgtccttcacaaccaatcttctctctctctctctctttctctgttggaagggaactctcgtccgtgagtttttgccagcatggctttttgtatgtacactgttaatttgaagcttaaaactttcacacatctcatacaccaaccatgtgggggcaaccattttcctcctcaaatctttcaattttgaaaactttctacccattgatcttttctctttctcctaactgttctgtgtcttgtccgcttccttccacaacttttttagttaagtgaatcataactttcttttgttttcaaagaaaaagaatgcttttcctttcactttattaaacctttctcaaattccacactatccatccaacaaagatcatatgaaaatgaaacaatattactcgataaaagtctctaacttttcgtttctgaaaaatggcaaaaaaagcaaagaaattaagtccaagaagattcaggatccatcctcatttatgtcattaatttaccaatattcttgtgcagcatatggttattaggtatatgcttgtttaatcttagttgtcaagtcaagtcaagtcattgggatcaataatataatacaatcaaagtagcaataaaagaaagattttatagctgatagaattcacatgcaggacaaaagctttgccaaaatgtgaatccacacttggcagccacagagaagacggattaggtgttggagctgcagcaaagtctcagccacaaccgtaaaaacctaaaaaggtgcgaatttttctatatcagttacactgttcttcgtgatagatatagacaaaacttttgtatttgattttgtcctgacttcaaattctagaatgatccgtgaactcccttgttcccaatggatcattatttttctctcccttcaaaccccactttaaaaaataatcaaattaccaaataatactataaactcatgaaattctgccattttggagtgcgtaattgtttataggtaaagtaggtagctgggactgtttgtatgctattttttattgtttctaattattattctttgtcgaaagatgtcatttggcgaacctaaccaaacacgtcaccagacaccatggtttctgggtataatgggaaaatgaaatgggtagcacgacaggttgaagagtttggtgcctcgcctggtgacccaaaccaccattcccttcataattaaaaaattaaaaaataaagcgaaagaaaacaattggagtcgaaattatttaaaggtgtgtctattaattgaatgagttcacgggggaagaacacttggtaggcaaagttcacgcgcacaaaaagacggctcaaataataattttttttcctcctcctcggtgcttatacgatacaatggtggtcttagaactcgatgaatcaacagctcattacaatacttattacctaatacttagaattgtctgctccaaaggttactataagtttactgagcattaatatcatttttatgccgtcattgtggtaggtgaatctccgcattgaactttggttggatggcagaggcagagcattggcatcggttattagtgctgagaatgttggatgttcagccaatgaatatatgactatgaagaaaacgaagcaagttttgacatgttcagttttaaatttaattcacaattttttgaagtatcatgctccactgaggattaaatagggagggagatgaagactctgttcgtttggtgggcaattacgatggaaaatgacaggtggaagacgttaaaacctacccttgcctttcggtctaatcctttcttctgtgtagaagcgataggataggtatgtagaaaaggtgtggttttggtttgattgaaatttgaagggga

SEQ ID NO: 107 - DNA, 3344 bp, Cucumis sativus
  source 1..3344: mol_type = genomic DNA
agccgtcttctgttcactctgtggacgtggataaggactgataatctcttaattaaaacttaaaatatatcaacgacaatcctgttgtttatgaacaacaatttaagcgccatttctttggtccctctcggtcacggatcacatcaaacctttctaagttgtatagtagagctagagcccttgttcggctttcggagaagctgaaactgtgatgcgaatggtcagtaaattcgcttccttcgtcagaactattactcctgtaaaatccgaatttgtagccacaacatcaccaatccatttaccacatccatactctcctttgggtctgcatgtccatgctcgtgatcttatataccttaagaatcgacaaatcaataaactcataaaactgggccatctcgactctgctattaaattgttcgatgaaatgcctcttcatgacgttgttacatacaatttgctaatttctgggtgtcttcacaatggatatccacagcgcgcatttggtatatacagccaaatggttttacgaggtattagagaaagtgcgtcaacatttacttcagtcttgggtacttgtagcaacatggattttttcaaagaaggaagtcaaattcactgcagggttgttctttttggatttactttgaatttgtttattgccagctcgctaattggtttctatatgagaatgggtcttcatactgtagctttgaagctgttcgatgagttgccgcagcgaaatatagctgtttggaacttgttgcttcgttggtgctgtgaactgaggcaattcgaaaagcttcagggatttttctcgaaaatgcagttggaaggcttagagccaaatggtcttactttttcctatttgcttcgaggatttggtaacgagaagctcttagacgaagggaagcaactacataaccgtgctgttaagatcggattggtagaatcaaatatttttgttcaaaatgctttggtggatttctacgctgattgcagaagtttaacagaagcaaaaaatgcatttgaatgtattccattagataatgttatttcctggaattctattgttgcagtttatgcagacgtcggtttcttgtctgaatcacttgagctgttttctcggatgcagttttgggggaaaaggccctcaattcggtcgttaatggctcttttgaatttatctagtcggacaaggaatatccagttggggaaacagattcaatcttgtgctctgaaactgggttttggtcatgagagtagccaccttcaatcggccttgataaatatgtacggaagatgccttgatattgagagttcagtggccgtttatgaaagtatttctgtgagaactttggagtgttgcaactctttaatgacatctttgttacactgtggtgtcattgaagatgtgatcgagatgtttggattgatggttgacgagagaattggacttgatgaggttactctatctacaacattaaaagcaatatcaatatgttcaccagacttgagcagatgtagattgctccactgttgtgccataaaatcaggctttgaatttagctccgtggtttcttgttctttaatggattcttattcaagatgtggtcatgttgagctctcttggaaagtttttgaggaaatctattcccctggtgtcatttgtttcacctcgatcatcaatggatatgctcgaaatggactcgggaaggagggtgttgaaatactcaagatgatgatccagagaggcctgaaacctgacaaagtgactttcttgtgtgcattgatagggtgcaaccattcaggactggtcgaagaaggaagatttgtgtttgagttgatgaaaaccctttacggaattgaaccagactggaaacactattcatgtatggttgatcttcttggtcgtgcaggtctactggatgaggctgaaaagttgattcaaaaggtgcctgaaaaggtcaacggtgtaatctggagctccatgttaagaagttgtagagtccatagaaatgaaacaatcggaaggaaaattgtaaagtggttggtggacctcgaagctgaagatcctgccattcttttgcaggcttcaaatttctattctgatattggagattttgaaacttcaaagcaacttagagaaattgcattgacaaaaaaagtggtaagagaaattggtcacagtttaatagaagtaaaaagtcactgttaacttgggacttccgaatagtggaatcaatagcacggacagactgctacaactgagtacagtgatgccattgcctgccacctggaggtttctttcttggatctttggaaggtaagtttaggatattgttactcagttgaatattattagttcactgttggttattctctaaaagacagtggctttcttgcctcagaaccagcatctcttcctgtggatacataaaactacgagctgaatatagcaaaccactcgaggatccttccttctgtaggcgtctcattggatgattattatatcttatagttagtcaccctggcatcatgtttgcagtacataagctcagtcaatatgttgcaaacctaagacagtcacacttgcagcagctcgcactttgtttggtatctcaaaggaactcctggacaaggggttttcctataagctttaagcttctttcagattagtgcctttagtgatgctgattgggcttcttgccttgatactcgcaagtgtacaccccgattttgtgtatttcttggtgattttttggtctcatggaagtcaaagaagcaaacgacagtttcaagttcatctgctgaggctgagtacagggcattggcagccactgtcagtgaagtttcttggcttgttcgatcacttaaagacttacaagtcagcataccagctcctcccttgttgttttgtgatagctctgctgctattcacatagcttcaaatccaacttttcatggaagagcgatgcacatcaagcttgattgccattttatctgtgaccatacagcaaaaggagacgtcagactgatgcctattcaaagttcttcccagcttgctgacattttcacctaggcattaccttcatgttcttttaaacttgtattgtccaagatgggaattttgaatatattaagttcatcttgagggggagtttttaggatattgtcaatcagttgaatattaattctgttattggtggttaaatcattgccacctcacattttgtaactcccattggatatctatactgccatttctcattaacggagattaaggcaaattttatctactctcaagtagtctgacagtaagtaaaagcttaatttatctgcaa

SEQ ID NO: 108 - DNA, 2526 bp, Daucus carota
  source 1..2526: mol_type = genomic DNA
catatcctttacctgaaaaacttaaattgatgaaaaaatcaattgcgtagccaagacaattataaactgttgaaccaactcattcatgataggggctaaattacaatgtttcattacatcattacagtaaaaagaattaggcgggctaaactgcaatgaatgaatgagctatgagaagcaaaaagcttgtaaatttaaccagagctatctcaacaattgcatgcaaaaacaaccccacgacaattccactcacttcgttacaattagacacatacatccaacccagtgatcgagacactatatattcatacaacaaagccattgattatcaagtaaagtacgggtctttaagctatgcacaccaactgtttgatgaaatgattgtgagagatgttgtgacttggaatgcaatgatatctgggtataacaaatgtgggttttttgaggaggctgtttggttgtatagacagatggttgttgagggggtttgtgaaagttcgagtactttttcgactgtgttgagtgtgtgttgtaatgcagggtggtgtcgacgagggcttgaggttttttcgagggcggtggttcttgggtttggtttgaatgtgtttgtggttagtgcagtgattagtgtttatatggggatgaatttttttgatgttgggtttaggttgtttagtggtttgagtgagaggaagttggctgtttggaatttggttttgagggggtgttgtgattcggggcggtcaagggagttgttcggggtttttaggagtatgggagaggagggggttaggggtaatgcgcttacgttttgttatatgattcgtgggtgtggaaatgatgagcttgttgaggaagggaaacaggtgcattgtcatgtagtgaagaatggctggtgtgaggtgaatatatttgttaagaatgctttagttgatttttattctgcttgcggatgtctgcttgatgctgagaaatcatttgtagttatttcgcccaaggatttgatttcgtggaattcaatggtttctgcatatggaaatggtggtttgatatttgaagcactagaaatattttctaaaatgcaatattgggggaagaagccatctgtgcgttcttttgtgggattgttgactttatgtcgtgaggagaagaatattgtattagggaatcagatacattgttttgtcaagaaaacagggtttgatgttggcagtgcctatgtgcaatccgctctgattgatatgtatggaaaatgtggcgagattgagacttcagtgtctatatttcaaggagatcatgaaatcagtcttgaatcttgtaactcaatgatgacatctctgttgcagtacgacatgtttgatgacgttgttgagttgtttgctatgatgcttgccaagggaatcagatttgatgaagttagtatctctaccacactaaaagcactatcactttccaattgtgctagcttgatgggcttcctaatgcttcattgttgtgtgataaaatcagggtttgtgatcaactcggcagtttcatgctctttaattgatgcatattctagatctggccatgttaaatgctctcaccaaatttttgaagaactgccctcagtaaacgtcgtgtcatttacatcaatcattaatgcatatgcgaggaatggaatgggaatgcaaggccttgggatgcttaaagaaatgaccgaaaaggatgtgaaacctgataaagttacattcttgtgtgtattaaacgggtgcaaccattcaggacttgttgaagaggggaaaatggtgtttgatctaatgaaaactgtttataatatacctccagacctaaaacattattcatgtatggtggatttgtttggacgtgcagggttgctggaagatgcagaagagcttcttaaacaagcaccaagaaaggacgattctgtcctttggagttcgttgttgaggagttgtaggatccaccgaaatgaggatgtcggtaggagagtgacaactatactgatggaccttgaacctgaggatcctgaaatttggttgcaagcttccaacttctatgctgaaataggagaatttgaaacttcatcgcatattagagaggttgcagtagcaagaaagatgaggctggatataggtaacagtttaattgaaacgaggggtcatttgtaaatcggtctagaccctgcagattggatgtcgtagacaatttttaaagtttctacttctagtctgaagtcttgctatcatgcatccaattttgtgtgtgatgcatggggatgctagaatctgctccaaatctgctccacaacaattgcaatacgttgaaggaagtagaatcaagatattgttattgatgatgaaacaacaggtaccaatgatattctcatctgtcttcacttttcactttctctgcacagaaacatatcatatttatgcagattttatcaaggcatgctatgatttgcagaagtgcatgtaattatagactttaagcatgcgatctttacggggatctgctcgataa

SEQ ID NO: 109 - DNA, 1989 bp, Eruca vesicaria
  source 1..1989: mol_type = genomic DNA
atgcgaggagcgcaagctttaaactttcttcgcagaacaacaacaaagttagctcaacacatacgttatacgtcggcggcgactcgtttggagtttggttcctgtctcgaagaaaactctaacgacctagtttatacccataaccgcaagattgatgatttgttaaaatccggaaacttgttatctgcacacgaggtgttcgatgaaatgtccctacgagatgttgtcacttataatctgatgatatctgggaacagccgaaaggggtgttctgtaaaagctttcgagctttacgcggagatggtctctaatggacttagagagagcgcttccacgtttccttctgttcttagtgtatgtagtgggttatgtagagaagggattcaagttcactgcagggtgatctcgcttgggtttgagtgtaatatgttcattagatctgcacttgcgggtttgtatgcctctttgcgggtttttgatgttgctctgaagctgttcgatgaaatgcctgagagaaacttagctgtttttaatttgatgttgagatgttattgtgagagcggagattcagaggagttgtttggagtgtatcgtaggatgggagttgaaggtgttgatgagaatgggttgagttattgttatatgattcgtggttgttctaatgatcggttgttatgtgaagggaagcaattgcattctctagtggttaaatctggttgggatgtttgtaatatatttgtggctaatgcgcttgtggacttgtactctgcttgtggtgatttatacggttctaagacatcgtttgatgctgtcccggaacaggatgtgatatcatggaactcgattgtttctgtgtgtgttgattacgggtctgtgcttgagtctcttgacttgtttagaaagatgcagttctgggggaagagaccttctgttaggtcattcatgtcgtttctgaatttttgtagcagaaactgtgatattgagtttgggaagcagatccattgttatgtcctcaagatgggttttgatgtttcaagtcttcatgtgcagtctgctttaattgacacgtacggtaaatgcgatgacattgagagttctgtttctgtttaccagagtttgtcttgcctgactctagagtgttgtaactcgctgatgacttctctgatgcactctggcatcactaaagatatcatcgagatgtttggtttgatgattgatgaaggaactggaatcgacgaagtcactctttctactgtcctcaaggctttatcactctctgaagaagtaacttcacagagctgcacgcttgtacattgctgtgccatcaaatccgggtatgcatctgatgctgcagtctcgtgctctctaattgatgcttattcgaagagcggtcagaatgaagtatctcggaaggtgtttgaggagcttgatgtacctaacgtattctgctggacttcgatcatcaatggctatgctagaaatggcatgggaagagactgtgttgagatgttgaaagaaatggatcggaagaatctcgttccagacgaagttacaatcttgtctgtgctatcaggttgcagtcactctggtcttgttgaagaaggtgagctgattttcaactcattggaatcgaagtatgggatagtcccaggaaggaaactgtatgcgtgcatggtggatttgttaggccgtgctggtttggttgaaaaggctgaacagctgcttcttgaggcacgtggagatgcagactgcatagcgtggagctcattactgcagagctgcaggattcatggaaacgaagcaatagggagaagggcagcggaagctttgatggatcttgaacctgacaacttcgctgtttacattcaagtttcgaaattttactttgagattggtgactttgaagtctccaggggaatcagagagattgctgcgtcacgagagcttatgagagagattggttacagttcagtcaccgtgagaaactga

SEQ ID NO: 110 - DNA, 2140 bp, Eruca vesicaria
  source 1..2140: mol_type = genomic DNA
tgtgtcggagacatgcgaggagcgcaagctttaaactttcttcgcagaacaacaacaaagttagctcaacacatacgttatacgccggcggcgactcgtttagagtttggttcctgtctcgaagaaaaccctaacgacctagtttatacccataaccgcaagattgatgctttgttaaaatccggaaacttgttatctgcacacgaggtgttcgatgaaatgtctatacgagatgttgtcacttataatctgatgatatctgggaacagccgaaacgggtgttctgtaagagctttcgagctatacgcggagatggtctctaatggacttagagagagcgcttccacgtttccttctgttcttagtgtatgtagtgggttatgtagagaagggattcaagtacattgtagagtgatttcgcttgggtttgaatgtaatatgttcattaggtctgcacttgtgggtttctatgcctctttgcgggtttttgatgttgctctgaagctgttcgatgaaatgcctgagagaaacttagctgtttttaatttgatgttgagatgttattgtgagagtggagattcagagggattgtttggagtgtatcgtaggatgggagttgaaggtgttgatgagaatgggttgagttattgttatatgattcgtggttgttctaatgatcggttgttatgtgaagggaagcaattacattctctagtggttaaatctggttggaatgtttgtaatgtatttggggctaatgcgcttgtggacttgtactctgcttgtggtgatttatatggttctaagacatcgtttgatgatatcccggaacaggatgtgatatcttggaactcgattgtttctgtgtgtgttgattacgggtctgtgcttgagtctcttgacttgtttagaaagatgcagttctgggggaagagaccttctgttaggtcattcatgtcgtttctgaattttggtagcagaaactgtgatattgagtttgggaagcagatccattgttatatcctcaaaatgggttttgatgtttcaagtcttcatgtgcagtctgctctaattgacatgtacggcaaatgcaatgacactgagagttctgtctctgtttaccagagtttgcctgatctgtctctggagtgttgtaactcgctgatgacttctctgatgcactctggcatcactaaagatatcattgagatgtttggtttgatgattgatgaaggaactggaatcgacgaagtcactctttctactgtcctcaaggctttatcactctctgaagaagtaacttcacagagctgcacgcttgtacattgctgtgccatcaaatccgggtatgcatctgatgctgcagtctcgtgctctctaattgatgcttattcgaagagcggtcagaatgaagtatctcggaaggtgtttgaggagcttgatgcacctaacttattctgctggacttcgatcatcaatggctatgctagaaatggcatgggaagagactgtgttgagaggcttaaagaaatggatcggaagaatctcgtaccagacgaagttacaatcttgtctgtgctatcaggttgcagtcactctggtcttgttgaagaaggtgagctgattttcaactcattggaatcgaagtacgggttagtcccgggaaagaaactgtatgcgtgcatggtggatttgctaggccgtgctggtttggtggaaaaggccgagaagctacttcttaaggcacgtggagatgcagactgcatagcgtggagctcattactgcagagctgcaggattcatggaaacgaatcaatagggagaagagcagcggaagctttgatggatcttgaacctgacaacttcgctgtttacattcaagtttcgaaattttactttgagattggtgactttgaagtctccaggggaatcagagagattgctgcgtcacgagagcttatgagggagattggttacagttcagttaccgtgagaaactgataacgcaagacagtgatttgcttcagcttcatcataaagaagagtgtaaacgattggctcttccacttgaagtcactacgcatgatttgacaacactctataaggacaagaagaaaggataagattctttatttgccgg

SEQ ID NO: 111 - DNA, 2444 bp, Glycine max
  source 1..2444: mol_type = genomic DNA
agtacaagtattcttctcgaattaggacagaacattcccgttgcatagtattgtgagagattcatggtcgtgtccttaattcaaacttgaaaacttgcaccccttcacaaaattccacaagtctcagtcactcccaatgctggtttcaacgctgaaaccatggtggagttggatgcaaaagcctctactccactccttcatcagagccataacaactcttacaccaatacctccacacacttttcttcaccttcacaaccccagcgacagtgtcatctacctcaagaaccgcgaaatcgacgctttcataaaacttagaaacctgaacgctgcactcgcagtgttccacaccacgccactgcgcgacactgtcacctacaacttaattatttccgcgttccgaaaccaaccaaatcacgctcttcgtttctacgctgaaatgggtttgcgtggaataagagaaagcccaaccacgttaacctctgttatagcggtttgcaccaacgctatgtttttcaaagagggtgttcaggtgcattgcagggtgatcaagttcgggtttacatgcaacgtgttcgtgggtggtgcacttgttgggttttacgcgcacgtgggggaatgtggggtggcactggacttgtttgatgagttgccagagagaaacttggctgtctggaacgtcatgctgcgtgggttgtgtgaactgggtcgtgtaaatgttgaagacttgatggggttttattaccctcggatgctttttgaaggtgtgcagccaaatggggttacgttttgttatttgcttagaggctgtggtaatcagagacggttggaggaagggaagaagattcaagggtgcgttttgaagatgggtttggtggaatcgagtgtttttgttgccaatgctctggtggatttttactctgcgtgtgggtgttttgttggtgcaaggaggtgttttgaggacatagaaaacgaggatgttatttcgtggaactcgttggtttcggtttatgcggagaataatatgttaattgaggctttggaggtgttttgtgtcatgcaagtgtggaggaaaaggccatcaattcgttctttggtgggtttgttgaatttgtgcagtagaagtggagagctttgtttggggaagcaggttcattgtcatgtgatgaagtttggttttgatgaagggagtgtgcatgttcaatctgctttgattgatatgtatggaaagtgcatggacattgagagttctgtgaatgtatttgaatgccttcccaagagaactttggattgtttcaactcattgatgacctctttgtcttattgtgatgcggttgacgatgtggttgaattgtttggtttgatgtttgacgagggtcttgtgccggatggagttaccttatcaaccacactgagggcattgtcagtgtccactttagcaagttttacgagttcccagttactacattgttatgcattaaaatctggacttggaggagatgctgcagttgcatgttccctcgtggattcatattcaagatggggccatgtggagctttctcgtcgaatttttgagagtcttccttctccaaatgctatttgcttcacatccatgatcaatgcatatgcccgaaatggagcggggaaagaaggaattgcagtgcttcaagctatgattgagaggggactaaagcctgatgatgttaccttattatgtgcactaaatggttgtaaccacacaggattagttgaggaaggaagattagtctttgaatcgatgaaatctcttcatggggtcgatccagatcaccgccatttttcatgcatggtggatctcttttgccgtgcaggacttctacatgaagctgaagagttgctgctacaggcaccgggaaaaggagactgttttatgtggagctctttgctgagaagttgcagggtccacaagaatgaagaggttggaacaagagcagcacaagtgttagttgagctagatccagatgaccctgcagtgtggttgcaagcttcaattttttatgctgaaatagggaattttgatgcatcaaggcaaatcagagaggttgctctatcaaggaagatgactagggaaattggtcatagtttaactgagataagacaatgacaggggaaaatagagttcctgaattgatgaagcattttcgcccattattcacagaagataagacaatcatgtcattttgatgagatgatgaagatgtttcctaagatggtaaggtcttgtctatttgggcaatcctacaatctaagggaaaggtttcttttgtaaggagtttttggtgagcatgcctagaaaatgagggtcggcatttgtattcccatgtttggtgtaactaactgacatcttctaaagatagaaaaataatttttctcccttttatgtatcacatggtattatgcctcta

SEQ ID NO: 112 - DNA, 2583 bp, Helianthus annuus
  source 1..2583: mol_type = genomic DNA
aagctaggccaaacaccccccttaaaagcctttgtagaataacttgagccaataaccaacatcaaacttctgttttgattattctcgtaactttgggttttcaatgctgcaaatttggcttaaattctgttgaaatgaggaagcaaattatggtttccattgccccactagtctcaaccttcactcataagtttgtccgaaacgcatcaacaacgtcttctttctttccatcgcaatttgactcttacttcgaacacaatcctcgagacaaaatttacacctacaacagagacattgaaaccttaatgaaatctgggtcagttgatcatgcactccaactgttcgacgaaatgcccatgagagacataatcacatataacatagttctttcggggcttaaacgtaatgggctgtcaaaagaagcattgtatgtgtacaatcaaatggtatcccaaggatttattgagagttcgtcaacgttttcgacggttttgggtgtgtttagtcaagaagggttgtatcaagaaggttttcaagttcacaacagggtggttgttcttggtttgagtttgaatgtgtatgtgggaagtgcattgattgatctttacatgaatatgggtcttgttgatcttgctttgagattgtttaacgatttaccggaaaggaatcttgctacatggaatcagttactaaaaggttttggtgaatttggaatgtcacaaaagttgcaattgtattataggatgaaaagagaaggtgttgcacctaatccgctcactttttgttatttacttcgttcgtttgggaacgagagtgtagtggatcaaggaagagagctgcattcttacacgattaaagttggatgggccgaatcggacgtgtttgtttcaaatgctttggtggatttttatagtgcttgtggcagtataacagatgccgagaaatcatttgaagttattccgacaaatgatgtgatttcttggaattcgttagtttctttgtatgcatcgaacgagattgcaagcgatgcgttaaggatcttttctatgatgcaagtatcgggaaagaagccgtcgattcgttcgtttgtgggtttgttgaatttatctagcaggaatgtaaatataattattggaaaacagattcattgttttgttttgaaactagggtttgatcacggtagttgttacgtttgttctgcgttaatcgatatgtacggaaaatgcggtgaaatagaaagttccgtgtcgatatacgaaagcgttccaagaaaaactattgaagtatgcaattcgttgatgacatcatttgcacattgtgggattgtggaagatgtgatcgaattgttcggtttgatggttgatgaagacatcgggtttgatgaagttagtctatccactacagtcaacacactgtctaggtcaacttacgctgggttgaccagctgtaaattgttgcatctttgtgctgtgaaatcgggttttgctcacgatcttgcggtatcttgttctttaatcgaaagttattcaagattcggagatgttaaatcgtctcgtcagattttcaaccagctttcttcaccgaatgttatatgttttacatcaatcatcagtgcttattcccgcaacaaaatgggaacggaatgctataaactcctcgaagtaatgattaacaagggtttgaaaccggataaagtgacattctcatgcgtgttaacagcttgcaaccattcgggaatggttcacgagggaaagatggtgtttgagtcaatgaagaccgtacatggcgttgacccagaaagtcaacatgtagcttgcatggttgaccttcttggacacaaaggtttacttgaagaagccgaacggttgctaaaacaaacacaatttaataacgactctgccatctggagttcattgttgcgccattgtagggcccaccataatgaaacagtaggaaaaagaattgcggaaacagtaattaaacttgagcctgaaaacgcttcaagttggttacaagtgtcgaacttttattcagaaatcagggattttgaaaccgctaaacaaattaaagacgttgcactagcaagaagaatgcaaagagatatgtttacgcctttacggtttaaataacgcgtctgattaaacgtgggccaccggaagagacactttttggatatgtgagtgttttatgagtgaagcaaaaggtctccagaaaatgtatattcttacacttgaagtattggtcatgtagaaaatctttcactttcatgtactttaaagccaagtaaattacctacaaaatttaccatttttagccctaacctatacatataaaataatctcatttcatcatatctgatttcatcaaacagtatcctgaagcttgtagaacttataaatcattaaatcatgagcaatatcatattcatttattttctcgctctgcttttcgtttgtgaaaacacgtgtaaggttagaagtttggaaaccgaagacgatgaaaaatgctcaagtgaacatggtatcaagacactcgtaaatgttgatagttttggtgctgttggagatggtgtttctgatgaca

SEQ ID NO: 113 - DNA, 945 bp, Humulus lupulus
  source 1..945: mol_type = genomic DNA
atgtatggcaaatgcggtgacatagagagatcggttgccatatatgaaaatgttaaagaaagaactctcgagtgctgtaactcgttaatgacatctttgatgcattgtggctgtactggagatgtggttgaaatgtttggtttgatggttgatgagggaattggaactgacgaagtgactctctccacaaccctgaaagcattatcagtctctgttttgacaagcttagcaagtttcaagatggtgcactgttgtgcagtaaaattaggacttgaatctgatctcgcagtttcctgctctctgattgatgcatattcaaaatgcggtcatatcaattactctcgaatggtatttgaacaacttcaaacaccaagcaccatatgttttacatcaatcatcaatggatatgcccagaatggaatgggaagtgaaggtcttaatttattccaagcaatgatccataagggtctgaaacccgataaagtgacatttttgtgtgcattagcagggtgcaaccattctgggttggtgaaagaaggaaaaatgctgtttgattcaatgaaaacttcatatggaatttgccctgatcggcagcattattcatgtatggttgatctttttggccgcgcaggcttgctagaagaagctgaggagctgttaattaaggcacagggaaacgaaaactcaatgatgtggagctcgttcttacgaagttgcagggtacataagaatgaaaaattgggaagacgagcagccaaagtcttgatggagcttgaaccagagaatcctgcaatttgtttgcaagtttcgaacttttactctgaagttggggagttttcaacttcaatggaaattagagagctggcaatggcaaggaaggttacaagagagattggtcacagtttaattgagaccagaaatcctagttcgaagttacaatcttga

SEQ ID NO: 114 - DNA, 2098 bp, Lactuca sativa
  source 1..2098: mol_type = genomic DNA
tgcaaccaggaaactccacaaaatgcggaagaaaattttggtctccgttgccccactcatcccaaccttcactcctacgtttctcagaaacgcatcaaccatacccgttttctttccctcccaattcgactcttacttccaacccaatcctcgggacacagtttacacttgtaacagagacattcagcgatatatgaaattaggatcgattgattccgcacttacactgttcgacggaatgcctatacgagacgcagttacatggaacttgattatttcgggacataagcataatgggttttcacgagaagcattgtacttctacactcaaatggtttcccaaggatttatcgagagttcatctacattttcgactgttttgggtgtatttagcgatgaagggttataccgagaaggacttcaagttcacggcagggcgatcgttcttggtttgagtttgaatgtgtatgtgggaacttcattgattgatctttacatgaacatgggtctcgtcagttttgctttgagattatttaacgatctaccagagaggaacatcgcaacatggaatcagttgctgagaggttttcgtgtatttggaagatcacaaaagttagaattgtattataggatgaaaagtgaaggtattgtgcctaatccactcaccttttgttatttgatccatggatttggcaacgaaaggttgattaatgaaggaaaagaactccattcttatgcaattaaggtgggatgggctgaatcagaattctttgtttcaaatgctttggtggatttttatagtgcttgtgggattctaacggatgccaaaagatcatttcaaatcattccaacaaacgatgtgatttcttggaattcattagtttctgtatacgcatataatgggcttgcaagcaatgctcttgaaatcttttctacaatgcaaacatgtgggaaaaaaccatcaattcgttcatttgttagcttgttgaatctatctagtgggagttcaaatattctccttgggaaacaagttcattgttttgtcttgaaacttgggtttgatcatggtagtatttacattcaatctgctttaatcgatatgtatggaaaatatggtgaaattgaaagctcggtgtcaatttacgaaaacgtccctgtaaaaactctcgaggtatgcaattccttgatgacatcatttgcaaagtgtggtgttgttgaagatgtgattgaattgtttggtttgatggttgatgaaggcattgggtttgatgaagttagtctatcaaccacatttaatgcattgtcaaagtcatgttttggtagcttgacaaactgtaaattattgcataattgtgctgtgaaatccggttttgatcatcatcctgcagtatcctgttctttactcagtagttattccaagtttggacgtgttaaatcgataggaagttaattggtgaatgagttgatgaagaaagtttaaaggatcttgtacattctctgagacgggtcaaaagaagaaacttaaaatgacattttgccacagtttttgacatgtgaaaggtcgactttcggtcaaagtcaaataagatgacttaaatgggtatttagtcaaatctggatttgtgtacaaattatgatgataaactttggactggggttttgatgcttcaacagaaccctagacgatagctatcttcatgtcggagaactgtaagatatcacatcattcaagtttgtgataattttggtttggtttttgttgggtgtggcaggagtttaaggaattgcaccttgcaaggtaggggtgagcatcggaacagggtacccgttttaggaaccggaactgccatggaaccaccgattccggaaataaggcggttccggttccggttcccaaagttttagaaccgccttatgcggttccggttcttagttttttcgaaccgctaaccgctgggttaccgtcggcatatatatatatatataaaatttaaacgacttacacagttatgaaagacttattgagtagtttgatttgttattgtgtaattgttactgtgatgtaaattaattagtttcaaatttaacatcaaattga

SEQ ID NO: 115 - DNA, 3369 bp, Nicotiana tabacum
  source 1..3369: mol_type = genomic DNA
atggagctggctatacttggcctgtggcacagtaaagctggctacagagctgactacgcttggcctgttgctaggcttgggtacgtggtgttttttttgtgctcttttcttgcactttcgtcctcttttcgtgcaactttcgttcgactctttcttccgatgctactacacataaaacaaaataatttagctcaaatatcgcacaatgactcattaaaccaacaaaatatagggcgagtaatgtactaaaagaataacattttggccagacatcatataacaagtattgtaacttataacaattttattttgtccttgaatatcgataatttttggaaaaagttaattcttcaataattggtaacaaattcatcaaataaaaaacaaaaatgaatttattttgcacattaagttgaaaaaaaataagaaaagattaaagaaaaaatatacgtaatttttattgactaaaaataccacctaaaatgaaacataaaaagtaaatttctacattgttcttggggggcatttgcatctatacccgctttttgtgtcagattttaacttgtgcccgctttgcaaaataaattgcaagcgtacccgctttttcacataacttcagcacacgggctgaagtagcaaagtcaatcacgtaaaacttcagcattctagtagccgggcctgaagttcagctctagagctgaaatttttgtgttgtaattggctacttttaacttcctctctgtaatgcacataacacatgagtatctgacgagcatgtttacttgaccaaaatgggatatttctataaccattgtgtcattgtccgtgggaagtcgttgcttccatggttccccatccatcctcataaatgtatgctcagcagcaccattgtgaaactcaaattggattctgctggcctacagatatataatagagaacaacattataaatccatgataaaaccaaagagcattagcttctctgtattatgagcacttattaaccaaagaacttaacaaaatgcaccagagaaacacattgacgaattgatcaaacatatttccatcttaagaataaaagctgaggttattaactgctactcccagggtgaagaaagattttcgatgcaagaccaataaaaaaaaataggctctgccttttgtcttttgttgagaagaggaaaacgaaggaggagaagaaggaggagaaagggagctgaagttatttaagaagtgggtacaagttaaaagtttttaaaaaaaatgggtataggttaaatggggcgaccaaatagggtcaatacatagcaataacattacttattactattattttgttttttcccgtctctacccctagtattcataaccaatgcaaagcaaacgtgttatagcggcgtgtgctatacgcagatacgtaaccactctttctcacaagtgccaacagaatagccaacagcccactctgcccctggacttttgctccgtgagcaactatgatgtttactcactgaacagaacattacgcgaccttgtcaagtatgggtctttaacctctgcactccacctgtttgaagaaatgcctaaacgtgatgtggttacatggaatattatgatttctggatatagtcattatgggtttccaagaaaatcagtgtacttgtataataaaatggtttctcaaggtatcagggagaactcgtccactttgtcctttatattgagcatatgtgctaacgcaggtttatacaaagaagggcttgagattttcagtagagtagttgtattgggatttagtatgaacttatatattgccagtgcacttgttaatatgtatatacaaatgggtcttatagatgttgctttcaaagtgttttatgacttaccaaaacgaaacttacctgtatggaacttggttttacgtggaattagtgaagcgggtaagcccagtgagttcttaagattgtatggtgatatgaagttggaaaatgtggagcctaatgggcttacaattttttatttgattcgaggttgttgtaaagagagacttcttgacaaaggcagggagatacattcccttgtgattaagacggggtggttagaatcaaatatctttttagctaatgcattggtggatttttactctgcttgtggcattttggttgatacaaataaagcatttcagtgtattccacctcaggatgttatttcatggaattcaatggtttctatttatgctgccaaagatttgttgcatgaagctgttcaggtcctagatgagatgagatcgtgggacaaacacccatctgctatgtctttcgtggcattgttgaatttatcaagtcgcaaaaaggaactgctctttggaaaacaagtgcacagttttgttatgaaattgggctttgattatggaaatgtactcattcagtcggctttgattgatatgtatgggaaaaatgatgacatagaaaattcagtttctgtattccagagcaaccctataagaagcctcgaatgttgtaattcaatgatgacatctttgctgcatcttggtgtcccccaagatgtgtttgagctgttcagttggatggtttgtgaaaatattacgtttgatgaagtgagtctgtcctcaacaataaaggcattatcattctattcctctcctagcttggatagctgtgatttgttacattgctgtgcaataaaatcaggttttgattttgatattatggtattatgttctctgattgatgcgtattcaagatctggacagattaggtactctcagaagatttttgaagcatttccttcacctaatatcatcggtttcacttcaataattaatgcatatgctcggaaaggaatgggaagtgaatgccttggattgtttgaagaaatgatccagaagggtctaaaaccagatgaagtaacattcttatgtatactgttgggctgcaaccattcaggcctagttgaagaggggaaaaagatttttgattcaatgagacttcatggggtctttccagacaggcggcactattcatgtatggtggatcttctgggccgtgcaggtctagtcattgaggcagaagagttgctaaaccatgcatcatcgacaggagattctgtgatgtggagctcacttttacgaagttgcagtattcatcaaaatgagcatgtcggaagaagagcagctaaaaagttaatggatcttgagccagaggatccttctgtttggttacaggcctcaaatttttattctgaaattggggagttcgagactgcaatatatattcgagaggttgcagttgcgagtaagatgagcagagatattggctatagtttaattcggctccatgagtgccattaa

SEQ ID NO: 116 - DNA, 2090 bp, Ocimum basilicum
  source 1..2090: mol_type = genomic DNA
atggccagaacaagtgcagcaaagttttggtcgaagcataaacccgcatttgtttacagtttctctcacccagttcgtgcaattactactattaacagtgccgccaatgcagatatttatgcgcataacagaatcatcagcgacctaatgaaatccgggtctttagattctgccgtcaagatgtttgatgaaatgaccgaacgagatgttatcacttggaacacaatggtttcggggcattatcgtcgtggatttctaaaggaatctttaaatttgtacaaccagatgatttctcaaggtttcatcgagaattcatcaacgttttcaactgttttgagcatttgcagttctgcagggttgttcagggaagggtgcgaggttcattgtagagcagctgttcttggatttagtacaaatgtgtacattggctccgctcttgttgatctctatttgcaaatgggctgtatcgacgttgctttaagattgtttgggaccttgcaagaaagaaatttggccacgtggaatgttgttctgcgtggattatgtgaaatgggacgagtgaaagagttgtttagattgtataatgagatgaaactggaagggttggagcctagtggactcaccttttgctatttggttcggagttgtggaaatgagaggtgtcttgatgaaggaatgaaactacattgttgcgtgatcaagagaggattggtcgattcaaatttgtttgtagccaatgctctggtggacttctactctgcttgtgggaatttggcagagactaagaaattgtttgaggtaataccacctgcagatgtgatttcgtggaactctatggtctccgtttgtgcagcaaatggctatgcctctgatggccttgttatctttcgagcaatgtatttgtcggggaagaaaccatcagcttgttcattcttggggttcttgaaattatccagctcaactaaaaacttagtatttggaaagcagacccattgttgcattctgaaggcagggctatattctgtcctcgttcaatcagctttgattgacatgtatggaaaatgtggagatattgacagtgcggcttgtgtattcgacagtgttcctgagagaagtctcgagtgttgtaattctcttatgacatccttactgaagtctggtctcacagaggatgtgattgatctgtttggtttgatggttgatgagaagattggatacgatgaagttagtctttcgtcaagtttgaaagcaatatcactctctcttcctactggatgctctttgctgcattgctgcacgataaaatctggttttgaatctgatgtcgcagttgtctgtgctttgattgatgcatactcaagatctggtgaagtcaaattctccctccagattttctctcaactttcatctccaaatgttatctgtttcacttcggttatcagtgccctagcgagaaacgggatgggcaaggaatgcctggaaatgctcgatgcaatgatccaaaacggtctaaaaccagataaagtgacattcttgagtgtgttaatgggttgcaatcattcaggaatggttgaagagggaagatgggtcttctactcgatgcaaactcagcatggagtaaagccagagaggcaacattattcatgtatggttgatcttgtagggcgcgcaggtttgctagatgaagcaatagagatactcaacaactctccatggaaagaagattttgtaatttggagctcagtgttgagaagttgcagggtttatcaagataaacaattaggatacaaagctgccaagatgttgatagaccttgaaccagagaacccttctagttggttgcaggcgtcttacttccattcagatatgggagattttgagaccatgaaacaatatcgggaaattgctgtggctagaaaggtgacaagggaaataggtcggagtatgatccaagtgcgtcatcactgctaaagacaacacaatataccatttttgacaatcagaccaacttacccaaatctggacaaaccccatcaaattgcagatttgccggctaattcgatccaggtcaattagaagtgaagataggc

SEQ ID NO: 117 - DNA, 5740 bp, Phaseolus vulgaris
  source 1..5740: mol_type = genomic DNA
atgcaaaagcctcaattcctctccttcctcagagccataacaactgttccacacacgtttcttctcactgattctctctacctaaagaaccgcgaactccacgctctcataaaacgcagggacctcaacgctgcacttccactgttccacagcatgctactgcgtgacactgtcacctacaacttgataatttccgggctccgcgagcaaccagaatacgctcttcgtttctacgccgaaatgggttcgcttggaataggagaaagctcgaccacgttctcctctgttgtagcggtttgcaccaacgccgcttttttcagagagggtgttcaggtgcattgcagggtggtcaagcttgggttttcatgcaacgtgttcgttggtggtgcacttgttgggttttacacgcgtatggggctaagtcgggtggcactggaattgtttgatgagttgccagaacgaaatttggctgtctggaatgtgatgctgcgtgggttgtgtgagctgcttcgtgtgaaagtggaagacttgttagggttttactctcggatgcgttttgaaggtgtggagccaaatggggttacgttttgttatttgctttgggagtgttgtaagcagagacggttgcatgaaggaaagacgattcatgggtgtgtttggaaggtgggtttggtggaatcgaacgtttttgttgccaatgctttggtggatttttactctgcgtgtgggtgtttggttggtgcaaggaagtgttttgaggccatagaaaatgcgaatgttatttcgtggaactcgttggtttctgtttatgctgaaaacagtttgctgcgtgaggcttttgaggtgtttagtgtcatgcaattgtgggggcgaaggccatcaattcgttctttggtggggtttttgaatttgtgcagtagaagtggagagctttgtttcgggaagcaggtacattgtcttgtaatgaagatgggttttgatgaagggagtgtgcatgttcagtctgctttgattgatatgtatggaaagtgcagagacattgagggttctgtggctgtatttgaatgccttcccaagagaacgttggagtgtttcaactcattgatgtcctctttgtctcattgtgaagccgttgaggacatggttgaattgcttggtttgatggtcgatgagggtcttgtgccggatgaagtaaccatatcaaccacattgaaggcattgtcagtgtcggctttagcaagttttacgagttcccagtcactgcattgttatgcattaaaatctggactcggaggacatgctgcagttgcctgttccctcatggatgcatattcaagaagcgggcatgtggatcttactcgtcgaattttcgagagtcttccttctccaagtgctatttgcttcacatccatgatcaatgcgtatgctcgaaatggaatgggaaaggaaggaattgcagtgcttcaggctatgattgagaggagactaaggccagataaagttaccttcttatgtgctctaagtggttgtaactacacaggactagttgaggaaggaagggtagtttttgagtcgatgaaagctcttcatggggtcaatccagaccgtcgccatttttcatgcatggtggatctcttatgccgcgcgggacttctctatgaagctgaagagttgctgctacgggcaccaggaaaaagagactcttttatgtggagctctttgcttagaagttgcagggtccacaagaatgaagaggttggaacaagagcagcacaagtcttacttgagctagatccaggtgaccctgcagtgtggttgcaagcttcaaatttttatgcagaaatagggaaatttgacgagtcaaggcaaatcagagaagttgctctagcaaggaagatgactagggagattggtcatagtttaattgagataagacagtgacgggaaaatagcgttcctgaattgatgaagcattttagacccattattcacacacgataaaataatcatgtcaatttgctgagctgatggagatgtttcctgagatagtaaggtattgtctatttgggccatcctacaatctaagggaaaggtttcctttgggaggagttcttggtgtgagtatgccagaaaaatgagggtcggtatttgctcccatgtttagtgtaactaactggcagcttccaaaaatagaaaaatattttcccccttttatgttccgcatgttattatgcgtttatactggtgcaattggagacagtggaatatgcaaaaagaatcttgaattatatgtcattcacttctctttcagggcggcaaagtggagatagtgcaacggtgaatattacttgtgacttttgtaactggttgatgagtaaagcaaaatactacaaaaatatttttccttgtactttaagcgtgggcatgtagaaaatgttgcacgttcatccactttcaagccaagccataaagccaccccaaatccttcatttttcagagctaatctacgcgtataaattataaccaaagtattcattcgcattaatcaaatcaaccaatccttgcaatacaaccaacaggagcaaaacatggacaaatttttctttgtttctttactggctttgctcattgcagttcatggagttgcaggaagcatgatgtatgacagcattggcatgcttgaagaacttaaaagcttggactccatagacatagaagaagaaactgaggtagaactttctgacatcccttcatggagaagcgagcatggtggtaaagttcttgttaatattgatagctttggtgctgctggtgatggagaatctgatgatactgaggtaacttctttcattattgttgttgagatatatattatataccaaggcttccaaatgcatatcattatttttactcttctgttttgctcaagaagcactttcattcatttgacaacgtcgaacagagacaaattgttctgctgagctaatcaatcaggtcaggcatcatcgcagaccagacaaaatcattctgtaataatgttttgtccattctcttttcatgattatcaggctttgcaaaaagcatggggagttgcatgctctactccaaaatctgttttgctaattcctcaaggtcgccgttacctagtcaatgcaacaagattcaaagggccttgtgcagacaagctcatcatccaggtgatcaaacacaaatatatagatttagtaattgtcctgtgattattgacgtagtatctgcatttccagattgatggtacattggttgccccagatgagcctaagaactgggatccaaaactgccacgggtttggcttgatttttccaaattggataaagctgtttttcaaggttctggagtcattgatggctcaggaagtaaatggtgggcagcatcttgcaaaaagaacaagtcaaatgtaattttcgcaaaatgtggtcttgattattttacagtttgtgaaaacttaatgataactttctgattttcctcctattttttgcaacagccatgcaaaggtgcaccaacagtaagaaccagtctcttaacctttcctgtcttctattttcaaatagaaggttttgcaagatgtgaaatcaagatcatcaaataataaagtagtttaactttgagagggtcattgcaggcatttacaattgatacaagtacatccataagggtgaaaggactgacaatccagaatagccaacagatgcattttaccatatcacgatgtgattctgttagaattaatggagttaaagtgtcagcacctggagacagtccaaacactgatggaattcatattagtgaatcaacaaatgtcataatccaagacagtaaaatcggaacaggttctgaacttggtgttcttcctcagcttaaagttccattttgctgaactatagaaacaatagtatggtttacccttaacagactttgaaacaaagaaacacagtagctaacttggaaaaagatattttgaacacacaaaaagaataaagaaaaaaaagtgaactttactcttgtgcttagatttctgccattgaaatacaaattaaaaaagaagaatactgaccagttgtgcttttgccctttcatcataatcacacgcactatattcaggggatgactgcatatcaattgtcaatgctagctctaatatcaaaatgaagagaatttattgtggaccaggacatggaatcaggtatcatctattcttcatgcccccatttaatttaaaattacacgccactctttgtttggtacattaaaatttatatagtttggttgttcgtacctataccataacttcctccacaaaattgtcacaaccttttgatgaaattttttctatctatcatttcgcttttcccttgtctcttggacaagcattacttacatgaaacatacatgatgacttcattaatttaatcggttacgttaattttcttttcttttctttctttgatccaatcaaagtgaaagtaaaagtgtatctgtttctggaacacttttctgattaaagtagttttttacctttttctaactctttatttttcagtattggaagtcttggtaaagacaactcaaccggcatcgtcaccaaagtgattttggatacagcagttcttagggagactaccaatggtctcagaattaagacttggcaggtctcaatcatgataaaattgatttaatctttcaacaatattttggttttggtttttatgcaatcattttttaatgctacattcgtaatacattgtccttgtttacgcgtagattttaattaattacccattataattatttaaaaaaattgaataattttttaaaaataattaacattttagacttacttattttcatttaatgctaaagctatattttgaattctaaatattatacttttccttcaagacgtctgttaatcacatcgactctttacaataccaaatgggcaaattatgtgatatttgtataatgtgatggaaattattattttattgtaatgtaaccaaaaataaagctgataataatcaaatattaatttagtaatattattataaatgatacatttgtttcataaactaatatatgtttttgctgtcacatagggaggttctggatatgttcgaggggtgcgttttcagaatgtgagagtagaaaatatatccaaccccattattatagaccaattttactgtgattcaccatctagttgtcagaaccaggtacagtctaccagttttctctttcaagcctcttacttaattttcataaattacacacttaagcttttattatgacatgattattttatctctaaaatgaattatggagtagagtaatccaacgaattgagtggcatatacctaaaatgatcttctaacgatgatcttattatattatgaactctttgtatagacatcagctgtggagataagcgaggtgatgtaccagaacattagtggcactacaatgagtgctaaggccattaaatttgactgcagtgacacaaccccgtgcagcaatctagtccttagcaacgtggacttagacaaacaagatggcacagttgaaacatattgtcactcagctcaaggctttccctatggggtggtgcacccttctgctgattgccttagttccaccgacaaaatctctcaagttgcagaatcaactatggaggaggatattcgtcacactgaactataa

SEQ ID NO: 118 - DNA, 2461 bp, Solanum lycopersicum
  source 1..2461: mol_type = genomic DNA
tgcgctgataagaaaacttgagagttaaaagtagtactattaataacactaatattaaaattatcacctcaaagcaataattgaatctggtatcacgttttctttgttttaatattttcttttgtcaccttcaataaaaaaaagttccaagaaagccaacttcaaaattgaggtgcaccaatttccaaggcgactaatgcctaatggcccttgaaatctccctacgacttgtatgattattattttgttccgtatttagcgccttaacttggttatcaatgcggacgaaacttactatggcgtcttttgccagaagcagatatgtaacaaccaattctcacaattgccaacaatgcactctacctcttcactttaactctctaagcaactatgatgtttcctcaactaacaaaacattacatgatgttgtaaagtatgggtctttaacctctgcacgccatatgtttgatgaaatgactaaacgtgatgttgttacatggaatatcatgatttctggatatagtcataatgggttcccaagaaaatcactgcacttgtataataaaatggtttctaacggtattatagagaattcatctactttctcctctatattgaccatatctgcaaatgtaggtttgttcaaacaaggggttgagattcacagcagagttgttgttttgggatgtagtatgaacttatatgttgctagttcacttattaatatgtatataaaaatggggtttacagatttttcttttaaattgttttatgacttacctaaacgaactttacccatatggaacttggttttaggcggaatttgtgaattgggtcggttgagtgagttcttaagattgtatagtgatatgaagatggagaatgtcgagcctaatgggctgacgttttgttatttgattaatggttgttgtaaagagatacttgttgatgagggaaggcagttgcactcacatgtgattaagacaggatggttaggatcaaatatttttttagctaatgtattagtggatttttactctgcttgtggtattttggttgatgctgataaagcatttgaatgcattccacctcaggatgtcatttcatggaattcaatggtttcagtttatgctgctaatgatttgttacgtgaagctgttcgagccttagaagagatgagattgtgggacaaaaatccctcttctatgtcatttgtggcattgttgaatttatcaagtcgcggaaaggaactgctatttggaaaacaaatacataattttgttataaaactgggttttgattgtgaaagtgtcctcattcagtcagctttgattgatatgtatgggaaaaatgatgacattcaaagttcaataactgtattccggtgttcacgtgagagaagtctcgaatgttgtaattcaatgatgacatctttgctgcatcttggtttcctacacgatgtatttgagcttttcagtcagatggtttgtgaaaatattatgtttgatgaagtgagtttgtcctcaacaattaaggcattatcattgtattcctctcctagcttggataactgttgtttgttccattgttgtgcaataaaatcaggttttgattctgatagtatggtcttatgttctctgattgatgcatattcaagatctggacagattagattctctcagcagatttttgaagcacttcgctcacctaatattttcggtttcacttcaataattaatgcatatgctcagaaaggaatgggatatgaatgccttgcagtgtttgaagaaatgatccaaaagggtctaaaaccagataaagtaacattcttgtgtatactgttgggatgcaaccattcaggtctagtcgaagaggggaaaaggatttttgattctatgaggactctccatgatgtctatccagacaggcggcactattcatgtatggttgatcttctaggtcgtgcaggtctagtcaatgaggcagaagagctgctaatgcatggttcatcggaaggagattctgtcatgtggagctcacttttgcgaagttgcaggattcatcaaaatgaacatgttggaagaagagcagctaaaaggttgatggatcttgagccagaggatccttctttttggttacaggcctcaaatttttattctgaaattggagaatttgaggctgccgtatacattcgagaggttgcagtggcaaggaagatgagcagagatattggctatagtttaattcgggtacatgagttccattaaatatacactcaaacaaaaagagggaaaaaaggacatcatggctgtttggtctgcaggacatgctggatatactttttctttaaaaaaatatatctaccagaatggagagactttgtctgcctctatacttttgaagcaaggacactgtgctgcttgttaaccaactctaataccaaaatacaatacaagtttca

SEQ ID NO: 119 - DNA, 1794 bp, Solanum tuberosum
  source 1..1794: mol_type = genomic DNA
atgcctaaacgtgatgttgttacatggaatatcatgatttctggatatagtcataatgggtttccaagaaaatcattgcacttgtataataaaatggtttctaatggtattatagagaattcatccactttctcctctatattgaccatatctgctaatgcaggtttgtttaaacaaggggttgagattcatagcagagttgttgttttgggatgtagtatgaacttatatgttgctagttcacttgttaatatgtatataaaaatggggtttatagattttgcttttaaattgttttatgacttacctaaacgaaatttaccgatatggaacttggttttacgcggaatttgtgaattgggtcggttgagtgagttcttaagattgtatagtgatatgaagatggagaatgtcgagcctaatggggttacgttttgttatttgattcatggttgttgtaaagagagacttgttgacaagggcaggcagctgcattcccatgtgattaagaatggatggttagaatcaaatatttttttagctaatgtattggtggatttttactctgcttttggtattttggttgatgccgataaagcatttgaatgtattccacctcaggatgtcatttcatggaattcaatggtttccgtttatgctgctaatgatttgttacatgaagctgttcgactctttgaagagatgagattgtgggacaaacatccctctgctatgtcgttcgtggcattgttaaatttatcaagtcgcggaaaggaactgctatttggaaaacaaatacataattttgttataaaagtgggtattgattatggaagtgtcctcattcagtcagctttgattgatatgtatgggaaaaatgatgacgttcaaagttcaattgatgtattccagtgttcacatgagagaagtctcgaatgttgtaattcaatgatgacatctttgctgcatcttggtttcctacaagatgtgtttgagctttttagttggatggtttgtgaaaatattgtgtttgatgaagtgagtttgtcctcaacaattaaggcattatcattgtattcctctcctagcttggataactgttgcttgttgcattgttgtgcaataaaatcaggttttgattctgatagtatggtcttatgttctctgattgatgcatattcaagatctggacagattagattctctcaacagatttttgaagcacttccctcacctaatattttcggtttcacttcaataattaatgcatatgctcagaaaggaatgggatatgaatgccttgcagtgtttgaagaaatgatccaaaggggtctaaaaccagataaagtaacattcttgtgtatactgttgggatgcaaccattcaggtctagtcgaagaggggaaaatgatttttgattctatgagaactattcatgatgtctatccagacaggaggcattgttcatgtatggtggatcttctaggccgtgcaggtctagtcaatgaggcagaagagctgctaatgcatgcttcatcggaaggagattctgtcatgtggagctcacttttgcgaagttgcaggattcatcaaaatgagcatgttggaagaagagcagctaaaaggttaatggatcttgagccagaggatccttctttttggttacaggcctcaaatttttattctgaaattggagaattcgaaactgccatatacattcgagaggttgcagtggcgaggaagatgagcagagatattggctatagtttaattcgggtgcatgagttccattaa

SEQ ID NO: 120 - DNA, 2585 bp, Vitis vinifera
  source 1..2585: mol_type = genomic DNA
attttaggtttatgttccccagctatatgcttaaactgaatttagatagcagagaattcgttttctgaaacagtaggatctgcatctattttcaacaaccctgattcaaatttcaatcgggataatagaggagaagcattgaatcaataaacttgcttgttagaagataaaatttcaggtctaatagttgggaaccgtaaattaaatatcagagacgtgcttgtgttctagcagtttttatgatgtgggacaatgtgaattgatggagtcagtgttcagtagctcctaaaccatgcagagaaggaatctactattctttcccagaagcataacaaacacttcactgaatttcacatccacagcttcatctccatccgcttctctgctattggactcgtactgtgaaaccaatccgcatgtggatctctactccaacaaccgagcaattgattcattgatcaaatctgggtccctagcctctgcccttcacttgttcgaaaaaatgcccatccgtgatgtagttacttggaatttgctaattaatgggtatcgtcagcatgaacttcccaaacaggcttttcagtactacagtgaaatggttttccagggcattagagaaagttcctccactttttcttctgttttgagcgtttgcagcaatgcaggtttgcaccaggaggcaattcaagttcatagcagggtgatttttctcgggttcagttcgaacttgtatgtggcaggttcgcttgttgatctttatatgcagatgggagactgtgatactgccttaagattgttcagtaacttgcctagaagaaatttggctatatgcaatttggttttacgtgggttttgtgaacttagtcgatcggaatggttattcaccatgtactctgcaatgaaagaagaatgtgttaagccgaatggccttactttctgttatttaattcgcggatgtggtaacggtaggttttgtgacgaggggaagcagctgcattgtcatgcaattaaggttggatgggtagaagctaatttatttgctgctaatgctttggtggatttttactgtgtttgtgggaatttgattgacgctaagaaatcatttgaagctattcgagatgaggatgtcatatcatggaattcaattgtttctgtgtttgctgctagtggtttgctttctgatgctcttgaactatttgctaggatgcagtcatgggggaagaagccgtccatccgttcatttgtgggattcctaaatgcagctattggatgtgacaatattatttttgggaagcaaattcagagtcatgttgtgaaattgggttttgctcctgggagtgtccatgttgaatctgccttgatcaatatgtatgggaaatgtggcgacatcaaaagctcagtatctgtgtttgagagtgtgcctgagagaactctggagatctgcaactcactgatgtcatctttgttgcactgtggtattgttgaagatgtgctggagttgtttggtttaatggttgatgagggaattggagttgatgaagtcactttgtccacttcactaaaggcatcgttagtatctgcttttggaagtttggcatgctgtagattgctgcattgttgtgcaataaaatcaggttttgaatttgatactgcagtttcatgttctttaattgatgcatattcaaaatatggtcatgtcgaactttcacatcagatttttgaacaacttcattcaccaaatgcaatatgtttcacttcaatcattaatgggtatgcacggaatggaatgggcagagaaggccttgaaatgcttgaaatcatggctaaacagggcctgaaaccagatagagtgacatttctgtgtgcattgacagggtgcagtcattcagggttggttgaagaaggaagatcggtgtttaactcaatgaagagtattcatggcattcacccagatcagcagcattattcatgtatggtagatcttctgggtcgtgcaggtctgttagatgaagctgaaggactgttaaaacatgccccagcaaagagcgattctgtgatgtggagctcactgctgcaaagttgtcggatccatggtgatactatagtaggaagaagagcagcaaaagtcttgatggagctggaacccgaggaccctgcaacttatttgcaagcttcaagcttttactctgaaattggggagcttgagatctcaatgcaaatcagagagattgcaattgcaagaagaatgaagagagagatgggtcacagtttaattgaggtgaacagtcacagttaacattagaattaccttgtactgagagaagaaggaaatcagccaaccgatgggaacagctgacaacctcctaacaacatggtggtttcatctatattttcatgctgctgaatccttggactttcttgttatgaataaacagggtcaggtttcaattgctttgttggtccgactaatcagttgacttctttttctattcattgtttattactatttttttttttgtacaatacttttatacaattgaagttgtcacggaaaataaatatggcttttcagattcattttaata

SEQ ID NO: 121 - DNA, 8488 bp, Zea mays
  source 1..8488: mol_type = genomic DNA
tgactgtcacacaaccgcgagaaccagcccactaccaaatcaatctgccggcggccggctgttgtccgagcgaccggcgcatggcagccaccgtgcgtctctgtccggtgggccgcggcccgcggcccgcaaaccaatgcccgagcacctcccctcgcctctacccgagcacctcccctcaagagcgcctccctcgccggagtcagacacgcctcccccgccgcgcgcatctctgcctaagcgccgctccgcccctcccctacgagagcactcttcgcccaaggttgcaggctgcagccaccaggcctctacggtggaggagaagaatggaggatgctgccaaacggtaggcttttgccggcttctacagttctacttattcaggaaacctacttgttacaaaagctcctgatattttaagccgttccatgaaactatctaggtcactgcgcagtgcgcacgtatttctttgatcgcttaactgcgagctctgctgctatacggctagacagacgcatcagtgccctactttcaggaagcagtgctagactgcgcagtgctcacccatccattgaaccatttatccctcagatccctgatttaacacaacccaccctcacattgcctatgcttcaggcaaagaaataagcatagagaatggagcaaccagctccagctattccgctcacagcgctccacatagcgatcgcgaactctagcctcagctccctggcattcatttcaaatgaaggaaattggaattttgtgtttagtactcatcaatttgtgattattgaagctccacaacttaaatatgataacaacttatggtgaaaataattgagttccaattcaaccacatgctaaaaactgtgaagcagcccttaacagataaccatagttttggtttcagtctgaatgttcattgaatggtgagagtcttttcttttagtctgaagtatggccttctggcatcggtggagaaattttgtatgctaaatttgcatgtatatcatggttcttagtgacaaatgccggttacaatctgttgttcaaatcttcattagagaacatgagctgtaccaaattctactatttacctatatgacattaacaagtggtgcttagatagccatattctagttttgatttatgtttttatgacccaagcatactgttctgaagttcctgtacactcgctcatctgattttgattcagtgaccctaagcaaactgttttggaccaggttgagatgagactccgcttcacaagacagtctccacggtttctctgcaatgggtagctcactgcagtctgatggaaattggagagatgcctgctgcttggacccttccctctgcaccaacttgacaatcccacaaatttgcatggtgagttggtgacctcaccctgcaagttgcacgtgccagcggggaattccccaagtatcacctctgtctccgctggatccatcagtgttcagtgaggctatttgtggtgatggcagcgtgggacgtcatttctttgaaccgcatgatcactggtttcattcgagatggtaccagcaaccgagcacttgtagtttacaagtggatggttgcttcaggcctgagagagacccctcacaccttctctgcagttctcggtgcgtgcaacagctgcgaggggctgcaactgcatggccgggtactggcattgggcctgcgctccaacccgttcgtcatgtctgcgttggtcaacctgtatatgcgcgttgaaacaccttgtgctgccctcctgctgtatgacgagatgccattgcagagcacagccatgtccaacgctgttctgggtggcttgtgcaacctgaagttggccgaggacctcttccgatctttgctagacatgagacggcgtggtctggagttgaatggcctttcctactgctacgcgatgaaagcatgctaccaagatgaggactggctggaacaaggcaggcagctgcacggagtggttctcaaggcagggtgggttccgtcgaacattttcctgtcgaactcgcttgtggatctctacgcagcaaccggagacttggtggacgctaagagttctctcgatgacatcccttctgaggacgtcatctcgtggaactccatcgtctctgtctgcgcgagcaaagggcgtacgaaggaagcaactggttacttgaggcagatgctttggcacggcaagacgccctcagtccgctcctttgttgggctcttcgccttatctggtcagaccggacacctccaagttggggttcagatgcacggtatcgctcttaagctcgggttcagctggagcagcgcgcacgtccagactgcactcattagcatgtatgggaactgctgccattttgattgttgcttggcaatcttcaacgaaaccccaagccttgcactggagtgctataatgcaatgatcacgtcatcaattggctgcaaggttttccactccgcgctggaggtcttgtactgtatggttgtcgagggagttatgcctgacaacgtgacgctatctgcgaccatgaaggccatatctttgtcagcttcgccgagtctaatcagctgccagatgctgcattcctgggtcttcaagctgggcttcgaagcggacatggttgtgtgctcctccttgatcagcgcatacgctcgagccggtcaggtgcacagctcccgctcggtgttcgaaagcctgcggagcccaaacgtcgtctgcttcacttcgatgatatctgcgtgcgcgcgacacggagatggcgcaaaaggagtggagctgctcagggagatggtttgtagggggctcaaacctgatgacgtcaccttcctgtgcgcgatcactggatgtgatcaggcaggactgattgaggaaggcaggctggtgtttgagtttatgagagcgacccgcgagctgggccctgacgagaggcacttggcctgcatggttaaccttctcggccgagacgggtttgtggaggaggcgatgaaggtgatgatggagcagcactcgccgctgcggcactacaccaaggcgtggagctcgctcgtccagagttgcaaggcacatggcgaagacgcgctgggaaggagagcggcagatacgctggtagacatgggacgagaggacgcggccaccagcttgcaggtgtcgagatacttctacgagattggggacggcgagaatgtctcgaggattaaaggcatggcaagtgggcaacgggtgaaggagatcagcggtcgcagctcggtcgagatcggccacggaataatctagcagccgaggttaaagaacggtatggattgttcaattccgtagttggctggctggttggttggttcacaatgtttaatatacaactgatggtctgaacggatgggagataggaaataccaaagtagaatctctttaggtggatcggggaattgttgtgtttagtactcatcaatatgtgattatcgaagcttcacaacttgaacatgataacaatttctggtgaaaacaatcgagttccaattcaaccacatactgcttggttggttggttcacaaagtttgagctggtactggcaacctacgcatcgcaggaggaaaggccatgctgccagcgtactaggtctggggcacaagctctccttgctccagatctgaatcttgggcaaggcacatgttgtctgtgcaggcaggctggtctcattcgtctttcctatcgtcttttcggacactgcttgctctcacaatctggggcccgtcgaatgtctctgcacttggcagcaacaggatggtgcccctcctccctgtactgtacttacgtggatgcgaagtgcaactgtgcagtgcagtttcctgaaagcggaaaaggccaaaccgggtggtgcaaatgtgtaaacagagtgtagtttgaaacaaggagtcaaatatgtgttagggcagtgatgctgttggagataaacttaagcatgcagtatagatatacgatgatgctgatggtggtgcgtctttgtatattttattttatttgtgctccccaccaccaccaccatcacacacctacctaccaccagttgccatccatccaatcatgcagtgacactaatagctgttatacaaagacgaaaacacactctgttcctgttagttacttggtaaactgaagttgggtttaggactctgagctgggctggtacagtgacatgataaaccaccagtaaatggcctgaaatgaaaagacagacagcgcatggatacccaactgtgtggcacaaacaagcagtgaaacaatgtgaatcaggaaacaaaagagaagaaaagaaaataaaggagaaagattcagtggtggtgctgggtgcggggtgtatcaaatatttccctgagccccggataaccggattccagagcggcggcctgcgacaggaacagtgggtggggccgggagcgcctctcgctctccactaccagtccaccacctcgctcgcagctctttcctcctccttttccttccttttttctttttttcccagcccacctcgctcgctcccttcccttcccagtggaagtggattggttgattgatcgcacagagctcgcctcacatccacacagcccgagctgctgcccgcccacccgcctgtagctcccctcctcacggagcaggcaggcaggcaggctgggattcccgtcgaagcagggcaggtacggcacggcccgcccggttgaatccctcggcctccctccgcgggggctaatttgtctcgctcgttcccgtctctactgctgctgcaggagctagggcgggtggaggagcctttgcccgggaacgaggagaggaggtggcagtggcaccccgcggctagggcagcgagagaggggcgaagaggaaggcggcgggcgcgtccgccatggctagcgaggaagtactccacaaggccggtctcgctactctcgcctctacttctactccgtcgcctttgccgctgcatccattcccagtctaccccgcgcgggctccctcgcctacctaccagctttaattgtcgcttcgcgcggatttaattgtcgctgctccttgcggttttgctttgctccggggccttgctgctgcctgctggtaccgtaccgactccgcgtcaaggaacatgctgctttcgggccccatgttcaaattgctaacctagggtttgggtggaacaccaagggtctagacagacatctagaagagtttgtgtatgcttattttgatggattggtaagatttgctaacctagggtttcagcgaatcctgtattctgccaactttttcctcagtatggagcgaattgtacctaaaagagtttgtggatgcttattttgatggattgataagatggctcatctgactccgcctgctaattcctgttgcacaggtccagaatcttatagagcgctgccttcagatgtacatgaacaagaaagaagtggttgatgccctctcccaccactccaggatagagccttgtatcactgaacttggtaacgctcactgttcgttctctcctcttcctctcgtccagccagacgactcattcctcttgcttgcaagtcggtccgaagttaattcatatacagatcttattctaccattggtccaatgttacatctgtgattctgtactatgatgcaatgcagatataatgctttacaacaataactgagcctttttagtctccgtacaatgtttgaagtaaacaattctctttgcccgtgtatcaattgtgttgtcttatgtgttcgacaaccaaatatggcttgcgtgtgtgggtcctgcgccaagcattaatcgccggtcggctctgtttttatttggttagagagattcgagatctgattggtgtgcttttcataagccacacgatctcctcaaccctatatatgtacactaggtctatcaatcaatcaatctattaatttcacacaatctcatcctatttctgtatgtttccccaaaatctacttattcagtggcaaacatgtattctagaaatcttaattggttccttctaatattctcatatactaggagtctaggataatgaaaagcgctatcatgtgtaaaaaatgtttggacccaacgtcctaccttaatgacaaactagataagctggctcactaagttctagttccacatccccttttttggaaaatttattttgcagtttatcatattgaaattgaatctgcgcttctgctctccacaaagacgccaacaaaaagtatggcagtgaaaaaatagcttatgaagtttcactgattctctcaaaatggctcacctacagccttgcattctgtagttttttttgtgttatagaaatcccttatggttgcaggctaattggcacttttttctctctctgtccttttcagtttggcaacaacttgagcaacagaatcctctgtttttcaaagcatacgatatgaggctaatgcttaagaatcaaataatggtcttcaacaggcttctccaggatcagttcgagattatgaataaagagttttcttcagggatcccttctatgtctcttcctaatgactctaattccaacctatgtaagacctttctttccagccttatcatgggcagggattgctcataattatttaacttagtgttctgatttgccttccggagtgaagtgctgtaacaatctgatggaatataaggcgtacatgttactttgcaaagtgatttaaccattgtataagttcaacaaatctggcattcattcggttgaagttttgttttttctcatgagatctcattcacacctgcacaaatacactcctctttcacttgctaataaattcaccttttgctatctccctagtctggcactttaatttggccactttatttacttgtttcagtgaagcaagattcatgctttttgccagagactgctcctggaaatgcaatgccagatggtataatgcacaatggaagttcaagtggtataataaatgacacaccatctggcgatcagttacttaatgctagtaaagacttgcatggccttcatagtcaaatagatgcttcaactagtctacagtcagaccagaatgcaactgctgtgctgtatggtgtagacaacgagacaagcgcaacaataaagaccgagtcttgctactcgagtaatgctgattttgccttctgtgggaacactttcctggaatcatgccagtcgataggtgatgcatctggtggtggatccttcagcagctcagagttgaatgggcaaccactaaacgattcaattttggatatggagtcatcatcatttagcttcttgaaccaaatgccccaaagcttcatgttttcagacctggcagatgatttcaaccaaaatgcaggtaccttaccagtgatatttgttgttgaattctttcttcctagtttggagtgcctacttcgttccttttgtcctcccattgtgcagtataagttatttgtcttgttttgggttttccccctcagaaataacaccatttctcactcctgagacaaatttctccgattcaacagggggagaccatacaggtgattcgtgctccttcctttttctcacaagtcacaaccaccccgtaaatacagcatatgctgcattctctgatcttcacgcattgacctcactgtaaacgcatttattcaacaagcaaacgtagttagggcatgtgtattagtgctttcttgggtggtactagtagtacctgtagggggtcgatgtttacaccaagaattcagtcgatgtaggccatgtttggcactgctgctgcttgttgaaaaaacagcttatctgataagctggtgaaaagtagcttctgcttgttggctgcttttagtgtattctgagaagtagctgaactgataagctgctgcagaagctagctgtttgacagaacttttgcttaaatttgtgaagaagctgaaaataagctgcgccaaacagggccgtagtctctaggataatcctctcttattttgagttgcattctctattagtggcgtagtcgcttgtggaaaaacatgcattctggtacttactggttttcttccactgcaggttgagcgggtcatgcacagcgtaccaaccatttgtacataggcacatgggcagtcgaatctgcattggtgaagaacttgaggaccttttgatctagcttgtttatttctctagtttttgcgtcttgatattgtggtagtttggggcttcgggtctggtgggttgtctagcccatcagaacgcgtaatgggtacggagtattggtcttccagtatgttttcagcgttaatttggctaatttcccccgcttggcttgtacaacaaattttatcagtactgagtaccatgagttgtactgctgtatatgctgcttcccactctctgaattggcagaatgattgatgagaagacactgcttggaggagttgcctcagttt

SEQ ID NO: 122 - DNA, 1965 bp, Beta vulgaris
  source 1..1965: mol_type = genomic DNA
atgccacacaaattgggcgactaaaattcccaaattactggaaaatatgtgcattttcccgtttcttgcatcttgattcctactataacactgatgcttctgagctaatcttttcgtacaatcgtaccatagaaaatcacatcaattcagggtctttagcctttgcccaccaactgttcgatgaaatgtctcttcgagatgccgtttcttggaatttactaatttctgggtacaaacgttatagaattccggacaaagcgttagaattatatactgaaatggtatctcaaggtttcagagaaaacccatcaacgttttcctctgttatgagcatttgtagcaatggtggatttctttttgagggggttcaagtacattgcagagtgatttcacttgggttttgccgaaatatgtatattgggtgttccattgtggatctttatatgcaaatggggtatgttgatgatgggttgaaagctttggatgaaatgcctgaaagaaatgttgctgcttggaattcggtttttcgtggattttgtgtattgggtttgtgggatgagatcataagacagtttcctagagtgaaaggtgatggagttgaattgaatgaacttatggtttgttatatgcttcagggttgttgtaatgggaactttgttagtcagggacaacagttgcattgtcatgctttcaaggctggattggttgaatcaaatcgtttcgttgctaacgctttggtggatttttactctgcttgtggaactctgagtgatgctcagaaatcatttgaagttattcctcaagatgctgtgatctcatggaattcaattgtttctgcatatgctaataatgggatgttgtttgatgcacttgagtgttttgaggcaatgcaatattggagtatgaaaccatctgtccgttcacttgttgcgttaatgaattcatgcagcagaagggagaatctttcattgggaagacagttgcattgttttgtcctgaaacttggttttgatcgtggaagcatccatgttgtctctgctctgattgatatgtatgggaaatgctatgagatggggacttcgtttaatgtatatgaggagtgccattataaaactatggagtgttgcaatactcttttgacatctatgttacattgtacttatactgaagaggtggttgagttgtttagattcatggttgatgaggtaattgaatttaatgaattctccttgtccactacactgaaagcattatcaggatcttcctttgcgggcttagcaagctgccaattgattcattctcttgctattaaacatggatttgaatctcatatcgtagtctcatgttcactaattgatatatattcaaaatttggtcaggttgatgattcaaactgtgtttttgaaggtttactttcacacagtgttttctcctttacatcaattataaacgggtatgcccggaatggcttaggaagagaatgcctgaaattactcgaagttatgcttcagaagggtttaaaaccagatagagtgacattcttgtgtgtcttgacagggtgtaatcattcgggtttagtagaggaaggaagaaaagtttttgagtccatgaatacactttatgatattgaaccagatcagaggcattattcatgcatggttgatctcttaggtcgtgcagggttggtatatgaagctgaagagttgttgaagctatcatatgtaaaagataattctttcatgtggagctcactgctgagaagttgtaggatacacaagaatgacgttgttggacaaagagtagcgaaacgcttgatggagcttgaaccgggaaattctggagtgtatatgcaagtttcgaacttttatcttgaagttggaaattctgaaatgtccatgcattacaaagaaattgggaaggcaagacaattggttagggagatgggccgcagcttcatcgtctgaa

SEQ ID NO: 123 - DNA, 1845 bp, Brassica oleracea
  source 1..1845: mol_type = genomic DNA
atgatttgttaaaatccggtgacctaatatctgcacacgaggtgttcgatgaaatgtccctacgagatgtcatcacttataatctgatgatatctgggaacagccgaaacggatgttctgtaaaagctttcgagctctacgcggagatggtctctcatggtcttagagagaacgcttccacgtttccttctgttcttagtgtatgtagtggtgatgaatggttatgcagagaagggattcaagttcactgcagggtgatctcgcttgggtttgagtgtaatatgttcattaggtctgcacttgtgggtctctatacttctttgcggctcgtttatgttgctctcaagctgttcgatgaaatgcctgagagaaacttagctgtttgtaatttgatgctgagatgttattgcgagaatggagattcgaaggggttgtttggagtgtatcgtaggatgggagttgaaggtgtcgatgagaacgggttgagttattgttatatgatccgtggttgttctaatgatcggttgttatgcgaagggaagcaattgcattctctagtggttaaatctggttggaacgtttgtaatatatttgtgggtaatgcgcttgtggacttgtactctgcttgtggtgatttatacggttctaagacatcatttgatgatgtccaggaacaggatgtgatatcgtggaactcgattgtttctgtgtttgctgattacgggtctatgcttgagtctcttgatttgtttagaaagatgcagttttgggggaagagaccttcagtgaggtcattcatgtcgtttttgaatttctgtagcagaaacagtgatactcagtctgggaagcagatccattgttatgtcctcaaaatgggatttgatgtttctagtgttcatgtgcagtctgctctaattgacatgtacggcaaatgcaatgacattgagagttctgtgtctgttcatcagagtctgcctcgcctgactctggagtgttgtaactcgctgatgacttctcttaggcactgcggcatcactaaagatatcatcgagatgtttggtttgatgattgatgaaggaactggaatcgacgaagtcactctttctactgtcctcaaggctttatcactctctgaagcagtaacttcacagagctgcacgcttgtacattgctgtgccatcaaatccggatacgcatctgacgctgcagtcttgtgctctctaatcgatgcctattcgaagagcggcgagaatgaagtgtctcggaaggtgtttgatgagattgattcacctaacgtattctgctggacctcgatcatcaatggatatgctagaaatggcatgggaagagactgtgttgagatgctgaaagaaatggatggaaagaatctcgtaccagacgaagttacaatcttgtctgtgctatcaggttgcagtcactctgggcttgttgaagaaggtgaagtgattttcaactcattggagtcgaagcacgggatagtcccaggaaggaaactgtatgcgtgcatggtggatttgctaggccgtgctggtttggtggaaaagggcgagaagctgcttcttaaggcacgtggagatgcagactgcatagcgtggagctcattgctgcagagctgcagggttcatggaaacgaagcaataggaagaagagcagcggaggttttgatggatcttgaacctgacaacttcgctgtttacattcaagtttctaagttttactttgagattggtgactttgaaatctccaggcgaatcagagagattgctgcctcacaagagctcatgagagagattggttacagttcagtcatcttgagaaactgat

SEQ ID NO: 124 - DNA, 1797 bp, Capsicum annuum; identical to SEQ ID NO: 101
  source 1..1797: mol_type = genomic DNA

SEQ ID NO: 125 - DNA, 1633 bp, Chenopodium quinoa
  source 1..1633: mol_type = genomic DNA
atgatacccaggcctttgttagtgcatggaagcaggcttgttcttcacaaaaagcagtcctcttagttcctgaagggcgtcgttatcttgtcaacgcaacaaaatttgaaggaccgtgtgcaggcagattagttatccaggttgatggtacaatagttgcaccaggagagcccaaggactgggatccaaaattttcccggacttggttgaattttcacaacttaacaagtgttattttccaaggcaaaggggtgattgatggatctggcagtaaatggtggtctgcatcctgcaaaaagaacaagaccaatccatgcaaaggagcaccaacagcactgacaatagattcaagctctgctataagggtaaagggtctgactatccagaacagccaacaaatgcactttgttattgcccgttccaattctgtgcgagtatccaatgtgctagtttcttccccagaagacagtcctaacactgatggaatacatatcactgaatcaacaaatgttgctctcctcgactgtaaaatcggaacaggggatgattgtgtttcaatcgtcaatgccagttcagctatcaagatgaagaagatttattgcggtcctggacatggaattagcataggaagcctgggcaaggataattcaactggcattgtcacaaaagttgtcctgagtggtgcatttataaagggtgcaagtaatggactcagaattaagacttggcagggaggatctggttatgtcaaagcaatacgctttgaaaatgtgatgatggaagacgttgcaaatcctataattatcgatcaattctattgtgactctcccaatccttgtggaaaccagtcgactgctgtgcaaataagtcaggtgatgtaccggaatattactggaactacgaagagcaagcaagccatgaagtttgcttgcagcgacacagttccttgcaagaacattgtcctcacgaacattgacttgcaccggacagaaggcacaacagagacatattgcaactctgtcactggttttggcttcggaacaatcaacccccctgctgattgccttacctccagtgacaaagattattccagtcctgatgacatgagaatttcccatcttggggaatcaatagaagatcacttagttcatacagagctgtgattttgcatcatattataggtacaaagtataacacttaagtattgagtttattaaatactcaaatggaattttaaatgatgtagaatacgtactttagggaagggtgtcacttcagacttggttttcaggtctaaaattttaacttttcctattttcttttttctaatttggattgtaatgatgcaatagaaatatcttattgataaatgattatttgttgttatagaaagattgtgtaatttaagtattttattccttaagaatttgaagtaccctgtgcaaccgtagcacaatttatgtacaaccttctatgtttccccaaattaattcacaaaactggaggtgtcaattcggatgatcgtatcgggtctgatgaggtcgggtcgggtcaatttttaaagttgagtcatgctaaattattgtgtccacgcgagttcaaatttaattcagataattgttccggtcggttt

SEQ ID NO: 126 - DNA, 2004 bp, Citrullus lanatus; identical to SEQ ID NO: 103
  source 1..2004: mol_type = genomic DNA

SEQ ID NO: 127 - DNA, 1992 bp, Cucurbita maxima
  source 1..1992: mol_type = genomic DNA
atgcgaaaggtcagggaattcgcctccttcgtccgaaccattacaactgttacttccgaatttgtatctatccatttaccacggccatactcgtattcgagtgtgcatgctcctgatgccatttacctgaagaatcgagaaatcgatagactcattaaatttggccatcttagtgctgccattaaattgttcgatgaaatgcctcttcatgacgttgttacgtacaatttgctcatttctgggtgttttcgccatgggcatccagagcgcgcatttggtctctacagccaaatggttttacgaggaattagagaaagtgcgtcaacatttacttctgttttgggtacttgtagcaacgcggatttttccaaagagggaagtcaaattcactgcagggttgtttttcttggatttagtttgaatttgttcattggtacctctctaatcgattattatatgagaatgggtcttgatattgtcgctttgaagctgtttgatgagttgccgcaacgaaatatagctgtttggaacttgttgcttcgtcggttttgtgaactgggtcaattcgaaaagcttctggggtctttctcgaaaatgcaattggaaggcgtagagccaaatggtctaactctttgctatttgcttcgaggtgttggtaacgaaaggctcttagacgaagggaggcaactacattcccgagctgttaagatcggactggttgaatcaaatatctttgttccaaatgctttggtggatttctactctgattgcagaagtttaacagaagcaaaaaaagcatttgaatgtattccattagaagacgttatttcctggaattcgattgttgcagtttatgcagacatcggtttcttgtcagaatcacttgagttgttttctcggatgcagttttggggaaaaaggccctcaattcggtcgttaatggcttttttgaatttatctagtcggacaaggaatatccagttggggaaacagattcaatcttgtgcgctgaagctgggttttggccatgagagtagtcaccttcaatcggctttgataaatatgtacggaaaatgctttgatattgagagttcagtggccgtgtatgaaagtatttctgtgagaactttggagtgttgtaactctttaatgacatctttgttacactgtggtgtcattgaagatgtgatagagatgtttggattgatggctgacgagggaattgggcttgatgaggttactttatccacaacgttaaaagcactatcaatgtcttctccaacagacttgaccggatgcagattgctccactgttgtgccataaaatcaggtcttggatttaattccgtggtttcatgttctttaatggactcttattcaagatgtggtcatgttgagctctcttgcaaagtttttgaggaaatccattcccctggtgttatttgtttcacctcaatcatcaatggatatgcccgaaatggaatggggaaggagggcatccaaatgcttaagacgatgatccagaaaggctggaaacctgacaaagtgactttcttatgtgcattgatagggtgcaaccattcagggctggtcgaagaaggaagatttgtgtttgagttgatgaaaacggtttgcggaattgaaccagactggaaacattattcatgtatggttgatcttcttggtcgtgtaggtctacttgatgaggcagaaaagttgctgctaaaggtgcccgagaaggtcaacggtgtaagctggagctccatgttaagaagttgtagaattcatagaaatgaaataatcggaaggaaaattgctaagtcgttggtggatcttgaagctgaagatcctgccgctcttttgcaggcttcaaacttctattctgatattggagattttgaaacttcaaagcaacttagggaagttgcattgacaaaaaaagtgataagagaaattggtcgcagtttaatagaggtgaaaagtcattgttaa

SEQ ID NO: 128 - DNA, 1881 bp, Cucumis melo
  source 1..1881: mol_type = genomic DNA
atgctcgcgatctcatttaccttaagaatcgagaaatcaataaacttataaaactgggccatcttgactctgctattaaattgttcgatgaaatgcctcttcatgacgttgttacatacaatttgctaatttctgggtgtcttcaaaatgggcatccacagcgcgcatttggtctatacagccaaatggttttacgaggtattagagaaagtgcgtcaacatttacttcagtcttgggtacttgtagcaacatggattttttcaaagaaggaagtcaaattcactgcagggttgttctttttggatttactttgaatttgtttattgccagctcgctaattgatttctatatgagaatgggtcttgatactatagctttgaagctgttcgatgagttgccgcaacgaaatatagctgtttggaacttgttgcttcgtcggtgctgtgaactgaggcaattcgaaaagcttcagggatttttctcgaaaatgcagttggaaggcgtagagccaaatggtcttactttttcctatttgcttcgaggatttggtaacgagaggctcttagacgaagggaagctactacataaccgtgctgttaagatcggattggttgaatcgaatatttttgttcaaaatgctttggtggatttctactctgattgcagaagtttaacagaagcaaaaaatgcatttgaatgcattcaattagacgatgttatttcctggaattcgattgttgcagtttatgcagacatcggtttcttgtctgaatcacttgagctgttttctcggatgcagttttgggggaaaaggccctcaattcgatcgttaatggctcttttgaatttatctagtcggacaaggaatatccagttgggaaaacagattcaatcttgtgctctgaaactgggttttggtcatgagagtagccaccttcaatcggccttgataaatatgtacggaaaatgccttgatattgagagttcagtggccgtttatgaaagtatttctgtaagaactttggagtgttgcaactctttaatgacatctttgttacactgtggtgtcattgaagatgtgatcgagatgtttggattgatggttgacgagagaattggacttgacgaggttactctgtctacaactttaaaagcactatccatatgttcagctgacttgagcagatgtagaatgctccactgttgtgccataaaatcaggctttgaatttagctccgtggtttcttgttctttaatggattcttattcaagatgtggtcatgttgagctctcttggaaagtttttgaggaaatccattcccctggtgtcatttgtttcacctcgatcatcaatggatatgctcgaaatggactcgggagggagggtgttgaaattctcaagatgataatccagagaggtctggaacctgacaaagtgactttcttgtgtgcattgatagggtgcaaccattcaggactggtcgaagaaggaagatttgtatttgagttgatgaaaacctacagaattgaaccagactggaaacattattcatgtatggttgatcttcttggtcgtgcaggtctgctggatgaggctgaaaagttgatccaaaaggtgcctgaaaaggtcaacgatgtaatctggagctccatgttaagaagttgtagaatccatagagatgaaacaatcggaaggaaaattgtaaggtcgttggtggacctcaaagctgaagatcctgccattcttttgcaggcttcaaatttctattctgatattggagattttgaaacttcaaagcaacttagagaaattgcattgacaaaaaaagtggtaagagaaattggtcgcagtttaatagaggtaaaaagtcattgttaac

SEQ ID NO: 129 - DNA, 1992 bp, Cucurbita pepo
  source 1..1992: mol_type = genomic DNA
atgcgaaaggtcagggaattcgcctccttcgtccgaaccattacaactgttacttccgaatttgtatctatccatttaccacagccatactcgtatttgagtgtgcacgctcctgatgccatttaccttaagaatcgagaaatcgatagactcattaaatttggccatcttaatgctgccattaaattgttcgatgaaatgcctcttcacgacgttgttacgtacaatttgctcatttctgggtgttttcgccatgggcatccagagcgcgcattaggtctctacagccaaatggttttacgagggattagagaaagtgcgtcaacatttacttctgttttgggtacttgtagcaacacggatttttccaaagagggaagtcaaattcactgcagggttgtttttcttggatttagtttgaatttgtttattggtacctctctaatcgattactatatgagaatgggtcttgatattgtcgctttgaagctgtttgatgagttgccgcaacgaaatatagctgtttggaacttgttgcttcgtcggttttgtgaactgggtcaattcgaaaagcttctgggatctttctcgaaaatgcaattggaaggcgtagagccaaatggtctaactctttgctatttgcttcgaggtgttggtaacgaaaggctcttagacgaagggaggcaactacattcccgagctgttaagatcggactggttgaatcaaatatctttgttccaaatgctttggtggatttctactctgattgcagaagtttaacagaagcaaaaaaagcatttgaatgtattccattagaagacgttatttcctggaattcgattgttgcagtttatgcagacatcggtttcttgtcagaatcacttgagttgttttctcggatgcagttttggggaaaaaggccctcaattcggtcgttaatggcttttttgaatttatctagtcggacaaggaatatccagttggggaaacagattcaatcttgtgcgctgaagctgggttttggccatgagagtagtcaccttcaatcggctttgataaatatgtacggaaaatgctttgatatcgagagttcagtggccgtgtatgaaagtatttctgtgagaactttggagtgttgtaactctttaatgacatctttgttacactgtggtgtcattgaagatgtgatagagatgtttggattgatggctgacgagggaattggacttgatgaggttactttatccacaacgttaaaagcactatcaatgtcttctccaacagacttgaccggatgcagattgctccactgttgtgccataaaatcaggtcttggatttaattccgtggtttcttgttctttaatggactcttattcaagatgtggtcatgttgagctctcttgcaaagtttttgaggaaatccattcccctggtgttatttgtttcacctcaatcatcaatggatatgcccgaaatggaatggggaaggagggcatcgaaatgcttaagacgatgatccagaaaggctggaaacctgacaaagtgacgttcttatgtgcattgatagggtgcaaccattcagggctggtcgaagaaggaagatttgtatttgagttgatgaaaaccgtttgcggaattgaaccagactggaaacattattcatgtatggttgatcttcttggtcgtgtaggtctacttgatgaggcagaaaagttgctgctaaaggtacccgagaaggtcaacggtgtaatctggagctccatgttaagaagttgtagagttcatagaaatgaaacaatcggaaggaaaattgctaagtcgttggtggatcttgaagctgaagatcctgccgctcttttgcaggcttcaaacttctattctgatattggagattttgaaacttcaaagcaacttagggaagttgcattgacaaaaaaagtgataagagaaattggtcacagtttaatagaggtgaaaggtcattgttaa

SEQ ID NO: 130 - DNA, 2007 bp, Cucumis sativus
  source 1..2007: mol_type = genomic DNA
atgcgaatggtcagtaaattcgcttccttcgtcagaactattactcctgtaaaatccgaatttgtagccacaacatcaccaatccatttaccacatccatactctcctttgggtctgcatgtccatgctcgtgatcttatataccttaagaatcgacaaatcaataaactcataaaactgggccatctcgactctgctattaaattgttcgatgaaatgcctcttcatgacgttgttacatacaatttgctaatttctgggtgtcttcacaatggatatccacagcgcgcatttggtatatacagccaaatggttttacgaggtattagagaaagtgcgtcaacatttacttcagtcttgggtacttgtagcaacatggattttttcaaagaaggaagtcaaattcactgcagggttgttctttttggatttactttgaatttgtttattgccagctcgctaattggtttctatatgagaatgggtcttcatactgtagctttgaagctgttcgatgagttgccgcagcgaaatatagctgtttggaacttgttgcttcgttggtgctgtgaactgaggcaattcgaaaagcttcagggatttttctcgaaaatgcagttggaaggcttagagccaaatggtcttactttttcctatttgcttcgaggatttggtaacgagaagctcttagacgaagggaagcaactacataaccgtgctgttaagatcggattggtagaatcaaatatttttgttcaaaatgctttggtggatttctacgctgattgcagaagtttaacagaagcaaaaaatgcatttgaatgtattccattagataatgttatttcctggaattctattgttgcagtttatgcagacgtcggtttcttgtctgaatcacttgagctgttttctcggatgcagttttgggggaaaaggccctcaattcggtcgttaatggctcttttgaatttatctagtcggacaaggaatatccagttggggaaacagattcaatcttgtgctctgaaactgggttttggtcatgagagtagccaccttcaatcggccttgataaatatgtacggaagatgccttgatattgagagttcagtggccgtttatgaaagtatttctgtgagaactttggagtgttgcaactctttaatgacatctttgttacactgtggtgtcattgaagatgtgatcgagatgtttggattgatggttgacgagagaattggacttgatgaggttactctatctacaacattaaaagcaatatcaatatgttcaccagacttgagcagatgtagattgctccactgttgtgccataaaatcaggctttgaatttagctccgtggtttcttgttctttaatggattcttattcaagatgtggtcatgttgagctctcttggaaagtttttgaggaaatctattcccctggtgtcatttgtttcacctcgatcatcaatggatatgctcgaaatggactcgggaaggagggtgttgaaatactcaagatgatgatccagagaggcctgaaacctgacaaagtgactttcttgtgtgcattgatagggtgcaaccattcaggactggtcgaagaaggaagatttgtgtttgagttgatgaaaaccctttacggaattgaaccagactggaaacactattcatgtatggttgatcttcttggtcgtgcaggtctactggatgaggctgaaaagttgattcaaaaggtgcctgaaaaggtcaacggtgtaatctggagctccatgttaagaagttgtagagtccatagaaatgaaacaatcggaaggaaaattgtaaagtggttggtggacctcgaagctgaagatcctgccattcttttgcaggcttcaaatttctattctgatattggagattttgaaacttcaaagcaacttagagaaattgcattgacaaaaaaagtggtaagagaaattggtcacagtttaatagaagtaaaaagtcactgttaa

SEQ ID NO: 131 - DNA, 2001 bp, Daucus carota
  source 1..2001: mol_type = genomic DNA
atgagaagcaaaaagcttgtaaatttaaccagagctatctcaacaattgcatgcaaaaacaaccccacgacaattccactcacttcgttacaattagacacatacatccaacccagtgatcgagacactatatattcatacaacaaagccattgattatcaagtaaagtacgggtctttaagctatgcacaccaactgtttgatgaaatgattgtgagagatgttgtgacttggaatgcaatgatatctgggtataacaaatgtgggttttttgaggaggctgtttggttgtatagacagatggttgttgagggggtttgtgaaagttcgagtactttttcgactgtgttgagtgtgtgttgtaatgcagggtggtgtcgacgagggcttgaggttttttcgagggcggtggttcttgggtttggtttgaatgtgtttgtggttagtgcagtgattagtgtttatatggggatgaatttttttgatgttgggtttaggttgtttagtggtttgagtgagaggaagttggctgtttggaatttggttttgagggggtgttgtgattcggggcggtcaagggagttgttcggggtttttaggagtatgggagaggagggggttaggggtaatgcgcttacgttttgttatatgattcgtgggtgtggaaatgatgagcttgttgaggaagggaaacaggtgcattgtcatgtagtgaagaatggctggtgtgaggtgaatatatttgttaagaatgctttagttgatttttattctgcttgcggatgtctgcttgatgctgagaaatcatttgtagttatttcgcccaaggatttgatttcgtggaattcaatggtttctgcatatggaaatggtggtttgatatttgaagcactagaaatattttctaaaatgcaatattgggggaagaagccatctgtgcgttcttttgtgggattgttgactttatgtcgtgaggagaagaatattgtattagggaatcagatacattgttttgtcaagaaaacagggtttgatgttggcagtgcctatgtgcaatccgctctgattgatatgtatggaaaatgtggcgagattgagacttcagtgtctatatttcaaggagatcatgaaatcagtcttgaatcttgtaactcaatgatgacatctctgttgcagtacgacatgtttgatgacgttgttgagttgtttgctatgatgcttgccaagggaatcagatttgatgaagttagtatctctaccacactaaaagcactatcactttccaattgtgctagcttgatgggcttcctaatgcttcattgttgtgtgataaaatcagggtttgtgatcaactcggcagtttcatgctctttaattgatgcatattctagatctggccatgttaaatgctctcaccaaatttttgaagaactgccctcagtaaacgtcgtgtcatttacatcaatcattaatgcatatgcgaggaatggaatgggaatgcaaggccttgggatgcttaaagaaatgaccgaaaaggatgtgaaacctgataaagttacattcttgtgtgtattaaacgggtgcaaccattcaggacttgttgaagaggggaaaatggtgtttgatctaatgaaaactgtttataatatacctccagacctaaaacattattcatgtatggtggatttgtttggacgtgcagggttgctggaagatgcagaagagcttcttaaacaagcaccaagaaaggacgattctgtcctttggagttcgttgttgaggagttgtaggatccaccgaaatgaggatgtcggtaggagagtgacaactatactgatggaccttgaacctgaggatcctgaaatttggttgcaagcttccaacttctatgctgaaataggagaatttgaaacttcatcgcatattagagaggttgcagtagcaagaaagatgaggctggatataggtaacagtttaattgaaacgaggggtcatttgtaa

SEQ ID NO: 132 - DNA, 1989 bp, Eruca vesicaria; identical to SEQ ID NO: 109
  source 1..1989: mol_type = genomic DNA

SEQ ID NO: 133 - DNA, 1989 bp, Eruca vesicaria
  source 1..1989: mol_type = genomic DNA
atgcgaggagcgcaagctttaaactttcttcgcagaacaacaacaaagttagctcaacacatacgttatacgccggcggcgactcgtttagagtttggttcctgtctcgaagaaaaccctaacgacctagtttatacccataaccgcaagattgatgctttgttaaaatccggaaacttgttatctgcacacgaggtgttcgatgaaatgtctatacgagatgttgtcacttataatctgatgatatctgggaacagccgaaacgggtgttctgtaagagctttcgagctatacgcggagatggtctctaatggacttagagagagcgcttccacgtttccttctgttcttagtgtatgtagtgggttatgtagagaagggattcaagtacattgtagagtgatttcgcttgggtttgaatgtaatatgttcattaggtctgcacttgtgggtttctatgcctctttgcgggtttttgatgttgctctgaagctgttcgatgaaatgcctgagagaaacttagctgtttttaatttgatgttgagatgttattgtgagagtggagattcagagggattgtttggagtgtatcgtaggatgggagttgaaggtgttgatgagaatgggttgagttattgttatatgattcgtggttgttctaatgatcggttgttatgtgaagggaagcaattacattctctagtggttaaatctggttggaatgtttgtaatgtatttggggctaatgcgcttgtggacttgtactctgcttgtggtgatttatatggttctaagacatcgtttgatgatatcccggaacaggatgtgatatcttggaactcgattgtttctgtgtgtgttgattacgggtctgtgcttgagtctcttgacttgtttagaaagatgcagttctgggggaagagaccttctgttaggtcattcatgtcgtttctgaattttggtagcagaaactgtgatattgagtttgggaagcagatccattgttatatcctcaaaatgggttttgatgtttcaagtcttcatgtgcagtctgctctaattgacatgtacggcaaatgcaatgacactgagagttctgtctctgtttaccagagtttgcctgatctgtctctggagtgttgtaactcgctgatgacttctctgatgcactctggcatcactaaagatatcattgagatgtttggtttgatgattgatgaaggaactggaatcgacgaagtcactctttctactgtcctcaaggctttatcactctctgaagaagtaacttcacagagctgcacgcttgtacattgctgtgccatcaaatccgggtatgcatctgatgctgcagtctcgtgctctctaattgatgcttattcgaagagcggtcagaatgaagtatctcggaaggtgtttgaggagcttgatgcacctaacttattctgctggacttcgatcatcaatggctatgctagaaatggcatgggaagagactgtgttgagaggcttaaagaaatggatcggaagaatctcgtaccagacgaagttacaatcttgtctgtgctatcaggttgcagtcactctggtcttgttgaagaaggtgagctgattttcaactcattggaatcgaagtacgggttagtcccgggaaagaaactgtatgcgtgcatggtggatttgctaggccgtgctggtttggtggaaaaggccgagaagctacttcttaaggcacgtggagatgcagactgcatagcgtggagctcattactgcagagctgcaggattcatggaaacgaatcaatagggagaagagcagcggaagctttgatggatcttgaacctgacaacttcgctgtttacattcaagtttcgaaattttactttgagattggtgactttgaagtctccaggggaatcagagagattgctgcgtcacgagagcttatgagggagattggttacagttcagttaccgtgagaaactga

SEQ ID NO: 134 - DNA, 2007 bp, Glycine max
  source 1..2007: mol_type = genomic DNA
atgctggtttcaacgctgaaaccatggtggagttggatgcaaaagcctctactccactccttcatcagagccataacaactcttacaccaatacctccacacacttttcttcaccttcacaaccccagcgacagtgtcatctacctcaagaaccgcgaaatcgacgctttcataaaacttagaaacctgaacgctgcactcgcagtgttccacaccacgccactgcgcgacactgtcacctacaacttaattatttccgcgttccgaaaccaaccaaatcacgctcttcgtttctacgctgaaatgggtttgcgtggaataagagaaagcccaaccacgttaacctctgttatagcggtttgcaccaacgctatgtttttcaaagagggtgttcaggtgcattgcagggtgatcaagttcgggtttacatgcaacgtgttcgtgggtggtgcacttgttgggttttacgcgcacgtgggggaatgtggggtggcactggacttgtttgatgagttgccagagagaaacttggctgtctggaacgtcatgctgcgtgggttgtgtgaactgggtcgtgtaaatgttgaagacttgatggggttttattaccctcggatgctttttgaaggtgtgcagccaaatggggttacgttttgttatttgcttagaggctgtggtaatcagagacggttggaggaagggaagaagattcaagggtgcgttttgaagatgggtttggtggaatcgagtgtttttgttgccaatgctctggtggatttttactctgcgtgtgggtgttttgttggtgcaaggaggtgttttgaggacatagaaaacgaggatgttatttcgtggaactcgttggtttcggtttatgcggagaataatatgttaattgaggctttggaggtgttttgtgtcatgcaagtgtggaggaaaaggccatcaattcgttctttggtgggtttgttgaatttgtgcagtagaagtggagagctttgtttggggaagcaggttcattgtcatgtgatgaagtttggttttgatgaagggagtgtgcatgttcaatctgctttgattgatatgtatggaaagtgcatggacattgagagttctgtgaatgtatttgaatgccttcccaagagaactttggattgtttcaactcattgatgacctctttgtcttattgtgatgcggttgacgatgtggttgaattgtttggtttgatgtttgacgagggtcttgtgccggatggagttaccttatcaaccacactgagggcattgtcagtgtccactttagcaagttttacgagttcccagttactacattgttatgcattaaaatctggacttggaggagatgctgcagttgcatgttccctcgtggattcatattcaagatggggccatgtggagctttctcgtcgaatttttgagagtcttccttctccaaatgctatttgcttcacatccatgatcaatgcatatgcccgaaatggagcggggaaagaaggaattgcagtgcttcaagctatgattgagaggggactaaagcctgatgatgttaccttattatgtgcactaaatggttgtaaccacacaggattagttgaggaaggaagattagtctttgaatcgatgaaatctcttcatggggtcgatccagatcaccgccatttttcatgcatggtggatctcttttgccgtgcaggacttctacatgaagctgaagagttgctgctacaggcaccgggaaaaggagactgttttatgtggagctctttgctgagaagttgcagggtccacaagaatgaagaggttggaacaagagcagcacaagtgttagttgagctagatccagatgaccctgcagtgtggttgcaagcttcaattttttatgctgaaatagggaattttgatgcatcaaggcaaatcagagaggttgctctatcaaggaagatgactagggaaattggtcatagtttaactgagataagacaatga

SEQ ID NO: 135 - DNA, 1995 bp, Helianthus annuus
  source 1..1995: mol_type = genomic DNA
atgaggaagcaaattatggtttccattgccccactagtctcaaccttcactcataagtttgtccgaaacgcatcaacaacgtcttctttctttccatcgcaatttgactcttacttcgaacacaatcctcgagacaaaatttacacctacaacagagacattgaaaccttaatgaaatctgggtcagttgatcatgcactccaactgttcgacgaaatgcccatgagagacataatcacatataacatagttctttcggggcttaaacgtaatgggctgtcaaaagaagcattgtatgtgtacaatcaaatggtatcccaaggatttattgagagttcgtcaacgttttcgacggttttgggtgtgtttagtcaagaagggttgtatcaagaaggttttcaagttcacaacagggtggttgttcttggtttgagtttgaatgtgtatgtgggaagtgcattgattgatctttacatgaatatgggtcttgttgatcttgctttgagattgtttaacgatttaccggaaaggaatcttgctacatggaatcagttactaaaaggttttggtgaatttggaatgtcacaaaagttgcaattgtattataggatgaaaagagaaggtgttgcacctaatccgctcactttttgttatttacttcgttcgtttgggaacgagagtgtagtggatcaaggaagagagctgcattcttacacgattaaagttggatgggccgaatcggacgtgtttgtttcaaatgctttggtggatttttatagtgcttgtggcagtataacagatgccgagaaatcatttgaagttattccgacaaatgatgtgatttcttggaattcgttagtttctttgtatgcatcgaacgagattgcaagcgatgcgttaaggatcttttctatgatgcaagtatcgggaaagaagccgtcgattcgttcgtttgtgggtttgttgaatttatctagcaggaatgtaaatataattattggaaaacagattcattgttttgttttgaaactagggtttgatcacggtagttgttacgtttgttctgcgttaatcgatatgtacggaaaatgcggtgaaatagaaagttccgtgtcgatatacgaaagcgttccaagaaaaactattgaagtatgcaattcgttgatgacatcatttgcacattgtgggattgtggaagatgtgatcgaattgttcggtttgatggttgatgaagacatcgggtttgatgaagttagtctatccactacagtcaacacactgtctaggtcaacttacgctgggttgaccagctgtaaattgttgcatctttgtgctgtgaaatcgggttttgctcacgatcttgcggtatcttgttctttaatcgaaagttattcaagattcggagatgttaaatcgtctcgtcagattttcaaccagctttcttcaccgaatgttatatgttttacatcaatcatcagtgcttattcccgcaacaaaatgggaacggaatgctataaactcctcgaagtaatgattaacaagggtttgaaaccggataaagtgacattctcatgcgtgttaacagcttgcaaccattcgggaatggttcacgagggaaagatggtgtttgagtcaatgaagaccgtacatggcgttgacccagaaagtcaacatgtagcttgcatggttgaccttcttggacacaaaggtttacttgaagaagccgaacggttgctaaaacaaacacaatttaataacgactctgccatctggagttcattgttgcgccattgtagggcccaccataatgaaacagtaggaaaaagaattgcggaaacagtaattaaacttgagcctgaaaacgcttcaagttggttacaagtgtcgaacttttattcagaaatcagggattttgaaaccgctaaacaaattaaagacgttgcactagcaagaagaatgcaaagagatatgtttacgcctttacggtttaaataa

SEQ ID NO: 136 - DNA, 945 bp, Humulus lupulus; identical to SEQ ID NO: 113
  source 1..945: mol_type = genomic DNA

SEQ ID NO: 137 - DNA, 1428 bp, Lactuca sativa
  source 1..1428: mol_type = genomic DNA
atgcggaagaaaattttggtctccgttgccccactcatcccaaccttcactcctacgtttctcagaaacgcatcaaccatacccgttttctttccctcccaattcgactcttacttccaacccaatcctcgggacacagtttacacttgtaacagagacattcagcgatatatgaaattaggatcgattgattccgcacttacactgttcgacggaatgcctatacgagacgcagttacatggaacttgattatttcgggacataagcataatgggttttcacgagaagcattgtacttctacactcaaatggtttcccaaggatttatcgagagttcatctacattttcgactgttttgggtgtatttagcgatgaagggttataccgagaaggacttcaagttcacggcagggcgatcgttcttggtttgagtttgaatgtgtatgtgggaacttcattgattgatctttacatgaacatgggtctcgtcagttttgctttgagattatttaacgatctaccagagaggaacatcgcaacatggaatcagttgctgagaggttttcgtgtatttggaagatcacaaaagttagaattgtattataggatgaaaagtgaaggtattgtgcctaatccactcaccttttgttatttgatccatggatttggcaacgaaaggttgattaatgaaggaaaagaactccattcttatgcaattaaggtgggatgggctgaatcagaattctttgtttcaaatgctttggtggatttttatagtgcttgtgggattctaacggatgccaaaagatcatttcaaatcattccaacaaacgatgtgatttcttggaattcattagtttctgtatacgcatataatgggcttgcaagcaatgctcttgaaatcttttctacaatgcaaacatgtgggaaaaaaccatcaattcgttcatttgttagcttgttgaatctatctagtgggagttcaaatattctccttgggaaacaagttcattgttttgtcttgaaacttgggtttgatcatggtagtatttacattcaatctgctttaatcgatatgtatggaaaatatggtgaaattgaaagctcggtgtcaatttacgaaaacgtccctgtaaaaactctcgaggtatgcaattccttgatgacatcatttgcaaagtgtggtgttgttgaagatgtgattgaattgtttggtttgatggttgatgaaggcattgggtttgatgaagttagtctatcaaccacatttaatgcattgtcaaagtcatgttttggtagcttgacaaactgtaaattattgcataattgtgctgtgaaatccggttttgatcatcatcctgcagtatcctgttctttactcagtagttattccaagtttggacgtgttaaatcgataggaagttaa

SEQ ID NO: 138 - DNA, 2037 bp, Nicotiana tabacum
  source 1..2037: mol_type = genomic DNA
atggagctggctatacttggcctgtggcacagtaaagctggctacagagctgactacgcttggcctgttgctaggcttggatacgtaaccactctttctcacaagtgccaacagaatagccaacagcccactctgcccctggacttttgctccgtgagcaactatgatgtttactcactgaacagaacattacgcgaccttgtcaagtatgggtctttaacctctgcactccacctgtttgaagaaatgcctaaacgtgatgtggttacatggaatattatgatttctggatatagtcattatgggtttccaagaaaatcagtgtacttgtataataaaatggtttctcaaggtatcagggagaactcgtccactttgtcctttatattgagcatatgtgctaacgcaggtttatacaaagaagggcttgagattttcagtagagtagttgtattgggatttagtatgaacttatatattgccagtgcacttgttaatatgtatatacaaatgggtcttatagatgttgctttcaaagtgttttatgacttaccaaaacgaaacttacctgtatggaacttggttttacgtggaattagtgaagcgggtaagcccagtgagttcttaagattgtatggtgatatgaagttggaaaatgtggagcctaatgggcttacaattttttatttgattcgaggttgttgtaaagagagacttcttgacaaaggcagggagatacattcccttgtgattaagacggggtggttagaatcaaatatctttttagctaatgcattggtggatttttactctgcttgtggcattttggttgatacaaataaagcatttcagtgtattccacctcaggatgttatttcatggaattcaatggtttctatttatgctgccaaagatttgttgcatgaagctgttcaggtcctagatgagatgagatcgtgggacaaacacccatctgctatgtctttcgtggcattgttgaatttatcaagtcgcaaaaaggaactgctctttggaaaacaagtgcacagttttgttatgaaattgggctttgattatggaaatgtactcattcagtcggctttgattgatatgtatgggaaaaatgatgacatagaaaattcagtttctgtattccagagcaaccctataagaagcctcgaatgttgtaattcaatgatgacatctttgctgcatcttggtgtcccccaagatgtgtttgagctgttcagttggatggtttgtgaaaatattacgtttgatgaagtgagtctgtcctcaacaataaaggcattatcattctattcctctcctagcttggatagctgtgatttgttacattgctgtgcaataaaatcaggttttgattttgatattatggtattatgttctctgattgatgcgtattcaagatctggacagattaggtactctcagaagatttttgaagcatttccttcacctaatatcatcggtttcacttcaataattaatgcatatgctcggaaaggaatgggaagtgaatgccttggattgtttgaagaaatgatccagaagggtctaaaaccagatgaagtaacattcttatgtatactgttgggctgcaaccattcaggcctagttgaagaggggaaaaagatttttgattcaatgagacttcatggggtctttccagacaggcggcactattcatgtatggtggatcttctgggccgtgcaggtctagtcattgaggcagaagagttgctaaaccatgcatcatcgacaggagattctgtgatgtggagctcacttttacgaagttgcagtattcatcaaaatgagcatgtcggaagaagagcagctaaaaagttaatggatcttgagccagaggatccttctgtttggttacaggcctcaaatttttattctgaaattggggagttcgagactgcaatatatattcgagaggttgcagttgcgagtaagatgagcagagatattggctatagtttaattcggctccatgagtgccattaa

SEQ ID NO: 139 - DNA, 1971 bp, Ocimum basilicum
  source 1..1971: mol_type = genomic DNA
atggccagaacaagtgcagcaaagttttggtcgaagcataaacccgcatttgtttacagtttctctcacccagttcgtgcaattactactattaacagtgccgccaatgcagatatttatgcgcataacagaatcatcagcgacctaatgaaatccgggtctttagattctgccgtcaagatgtttgatgaaatgaccgaacgagatgttatcacttggaacacaatggtttcggggcattatcgtcgtggatttctaaaggaatctttaaatttgtacaaccagatgatttctcaaggtttcatcgagaattcatcaacgttttcaactgttttgagcatttgcagttctgcagggttgttcagggaagggtgcgaggttcattgtagagcagctgttcttggatttagtacaaatgtgtacattggctccgctcttgttgatctctatttgcaaatgggctgtatcgacgttgctttaagattgtttgggaccttgcaagaaagaaatttggccacgtggaatgttgttctgcgtggattatgtgaaatgggacgagtgaaagagttgtttagattgtataatgagatgaaactggaagggttggagcctagtggactcaccttttgctatttggttcggagttgtggaaatgagaggtgtcttgatgaaggaatgaaactacattgttgcgtgatcaagagaggattggtcgattcaaatttgtttgtagccaatgctctggtggacttctactctgcttgtgggaatttggcagagactaagaaattgtttgaggtaataccacctgcagatgtgatttcgtggaactctatggtctccgtttgtgcagcaaatggctatgcctctgatggccttgttatctttcgagcaatgtatttgtcggggaagaaaccatcagcttgttcattcttggggttcttgaaattatccagctcaactaaaaacttagtatttggaaagcagacccattgttgcattctgaaggcagggctatattctgtcctcgttcaatcagctttgattgacatgtatggaaaatgtggagatattgacagtgcggcttgtgtattcgacagtgttcctgagagaagtctcgagtgttgtaattctcttatgacatccttactgaagtctggtctcacagaggatgtgattgatctgtttggtttgatggttgatgagaagattggatacgatgaagttagtctttcgtcaagtttgaaagcaatatcactctctcttcctactggatgctctttgctgcattgctgcacgataaaatctggttttgaatctgatgtcgcagttgtctgtgctttgattgatgcatactcaagatctggtgaagtcaaattctccctccagattttctctcaactttcatctccaaatgttatctgtttcacttcggttatcagtgccctagcgagaaacgggatgggcaaggaatgcctggaaatgctcgatgcaatgatccaaaacggtctaaaaccagataaagtgacattcttgagtgtgttaatgggttgcaatcattcaggaatggttgaagagggaagatgggtcttctactcgatgcaaactcagcatggagtaaagccagagaggcaacattattcatgtatggttgatcttgtagggcgcgcaggtttgctagatgaagcaatagagatactcaacaactctccatggaaagaagattttgtaatttggagctcagtgttgagaagttgcagggtttatcaagataaacaattaggatacaaagctgccaagatgttgatagaccttgaaccagagaacccttctagttggttgcaggcgtcttacttccattcagatatgggagattttgagaccatgaaacaatatcgggaaattgctgtggctagaaaggtgacaagggaaataggtcggagtatgatccaagtgcgtcatcactgctaa

SEQ ID NO: 140 - DNA, 3249 bp, Phaseolus vulgaris
  source 1..3249: mol_type = genomic DNA
atgcaaaagcctcaattcctctccttcctcagagccataacaactgttccacacacgtttcttctcactgattctctctacctaaagaaccgcgaactccacgctctcataaaacgcagggacctcaacgctgcacttccactgttccacagcatgctactgcgtgacactgtcacctacaacttgataatttccgggctccgcgagcaaccagaatacgctcttcgtttctacgccgaaatgggttcgcttggaataggagaaagctcgaccacgttctcctctgttgtagcggtttgcaccaacgccgcttttttcagagagggtgttcaggtgcattgcagggtggtcaagcttgggttttcatgcaacgtgttcgttggtggtgcacttgttgggttttacacgcgtatggggctaagtcgggtggcactggaattgtttgatgagttgccagaacgaaatttggctgtctggaatgtgatgctgcgtgggttgtgtgagctgcttcgtgtgaaagtggaagacttgttagggttttactctcggatgcgttttgaaggtgtggagccaaatggggttacgttttgttatttgctttgggagtgttgtaagcagagacggttgcatgaaggaaagacgattcatgggtgtgtttggaaggtgggtttggtggaatcgaacgtttttgttgccaatgctttggtggatttttactctgcgtgtgggtgtttggttggtgcaaggaagtgttttgaggccatagaaaatgcgaatgttatttcgtggaactcgttggtttctgtttatgctgaaaacagtttgctgcgtgaggcttttgaggtgtttagtgtcatgcaattgtgggggcgaaggccatcaattcgttctttggtggggtttttgaatttgtgcagtagaagtggagagctttgtttcgggaagcaggtacattgtcttgtaatgaagatgggttttgatgaagggagtgtgcatgttcagtctgctttgattgatatgtatggaaagtgcagagacattgagggttctgtggctgtatttgaatgccttcccaagagaacgttggagtgtttcaactcattgatgtcctctttgtctcattgtgaagccgttgaggacatggttgaattgcttggtttgatggtcgatgagggtcttgtgccggatgaagtaaccatatcaaccacattgaaggcattgtcagtgtcggctttagcaagttttacgagttcccagtcactgcattgttatgcattaaaatctggactcggaggacatgctgcagttgcctgttccctcatggatgcatattcaagaagcgggcatgtggatcttactcgtcgaattttcgagagtcttccttctccaagtgctatttgcttcacatccatgatcaatgcgtatgctcgaaatggaatgggaaaggaaggaattgcagtgcttcaggctatgattgagaggagactaaggccagataaagttaccttcttatgtgctctaagtggttgtaactacacaggactagttgaggaaggaagggtagtttttgagtcgatgaaagctcttcatggggtcaatccagaccgtcgccatttttcatgcatggtggatctcttatgccgcgcgggacttctctatgaagctgaagagttgctgctacgggcaccaggaaaaagagactcttttatgtggagctctttgcttagaagttgcagggtccacaagaatgaagaggttggaacaagagcagcacaagtcttacttgagctagatccaggtgaccctgcagtgtggttgcaagcttcaaatttttatgcagaaatagggaaatttgacgagtcaaggcaaatcagagaagttgctctagcaaggaagatgactagggagattggtcatattcatggagttgcaggaagcatgatgtatgacagcattggcatgcttgaagaacttaaaagcttggactccatagacatagaagaagaaactgaggtagaactttctgacatcccttcatggagaagcgagcatggtggtaaagttcttgttaatattgatagctttggtgctgctggtgatggagaatctgatgatactgaggctttgcaaaaagcatggggagttgcatgctctactccaaaatctgttttgctaattcctcaaggtcgccgttacctagtcaatgcaacaagattcaaagggccttgtgcagacaagctcatcatccagattgatggtacattggttgccccagatgagcctaagaactgggatccaaaactgccacgggtttggcttgatttttccaaattggataaagctgtttttcaaggttctggagtcattgatggctcaggaagtaaatggtgggcagcatcttgcaaaaagaacaagtcaaatccatgcaaaggtgcaccaacagcatttacaattgatacaagtacatccataagggtgaaaggactgacaatccagaatagccaacagatgcattttaccatatcacgatgtgattctgttagaattaatggagttaaagtgtcagcacctggagacagtccaaacactgatggaattcatattagtgaatcaacaaatgtcataatccaagacagtaaaatcggaacaggggatgactgcatatcaattgtcaatgctagctctaatatcaaaatgaagagaatttattgtggaccaggacatggaatcagtattggaagtcttggtaaagacaactcaaccggcatcgtcaccaaagtgattttggatacagcagttcttagggagactaccaatggtctcagaattaagacttggcagggaggttctggatatgttcgaggggtgcgttttcagaatgtgagagtagaaaatatatccaaccccattattatagaccaattttactgtgattcaccatctagttgtcagaaccagacatcagctgtggagataagcgaggtgatgtaccagaacattagtggcactacaatgagtgctaaggccattaaatttgactgcagtgacacaaccccgtgcagcaatctagtccttagcaacgtggacttagacaaacaagatggcacagttgaaacatattgtcactcagctcaaggctttccctatggggtggtgcacccttctgctgattgccttagttccaccgacaaaatctctcaagttgcagaatcaactatggaggaggatattcgtcacactgaactataa

SEQ ID NO: 141 - DNA, 1152 bp, Solanum lycopersicum
  source 1..1152: mol_type = genomic DNA
atggtttcagtttatgctgctaatgatttgttacgtgaagctgttcgagccttagaagagatgagattgtgggacaaaaatccctcttctatgtcatttgtggcattgttgaatttatcaagtcgcggaaaggaactgctatttggaaaacaaatacataattttgttataaaactgggttttgattgtgaaagtgtcctcattcagtcagctttgattgatatgtatgggaaaaatgatgacattcaaagttcaataactgtattccggtgttcacgtgagagaagtctcgaatgttgtaattcaatgatgacatctttgctgcatcttggtttcctacacgatgtatttgagcttttcagtcagatggtttgtgaaaatattatgtttgatgaagtgagtttgtcctcaacaattaaggcattatcattgtattcctctcctagcttggataactgttgtttgttccattgttgtgcaataaaatcaggttttgattctgatagtatggtcttatgttctctgattgatgcatattcaagatctggacagattagattctctcagcagatttttgaagcacttcgctcacctaatattttcggtttcacttcaataattaatgcatatgctcagaaaggaatgggatatgaatgccttgcagtgtttgaagaaatgatccaaaagggtctaaaaccagataaagtaacattcttgtgtatactgttgggatgcaaccattcaggtctagtcgaagaggggaaaaggatttttgattctatgaggactctccatgatgtctatccagacaggcggcactattcatgtatggttgatcttctaggtcgtgcaggtctagtcaatgaggcagaagagctgctaatgcatggttcatcggaaggagattctgtcatgtggagctcacttttgcgaagttgcaggattcatcaaaatgaacatgttggaagaagagcagctaaaaggttgatggatcttgagccagaggatccttctttttggttacaggcctcaaatttttattctgaaattggagaatttgaggctgccgtatacattcgagaggttgcagtggcaaggaagatgagcagagatattggctatagtttaattcgggtacatgagttccattaa

SEQ ID NO: 142 - DNA, 1794 bp, Solanum tuberosum; identical to SEQ ID NO: 119
  source 1..1794: mol_type = genomic DNA

SEQ ID NO: 143 - DNA, 2004 bp, Vitis vinifera
  source 1..2004: mol_type = genomic DNA
atgcagagaaggaatctactattctttcccagaagcataacaaacacttcactgaatttcacatccacagcttcatctccatccgcttctctgctattggactcgtactgtgaaaccaatccgcatgtggatctctactccaacaaccgagcaattgattcattgatcaaatctgggtccctagcctctgcccttcacttgttcgaaaaaatgcccatccgtgatgtagttacttggaatttgctaattaatgggtatcgtcagcatgaacttcccaaacaggcttttcagtactacagtgaaatggttttccagggcattagagaaagttcctccactttttcttctgttttgagcgtttgcagcaatgcaggtttgcaccaggaggcaattcaagttcatagcagggtgatttttctcgggttcagttcgaacttgtatgtggcaggttcgcttgttgatctttatatgcagatgggagactgtgatactgccttaagattgttcagtaacttgcctagaagaaatttggctatatgcaatttggttttacgtgggttttgtgaacttagtcgatcggaatggttattcaccatgtactctgcaatgaaagaagaatgtgttaagccgaatggccttactttctgttatttaattcgcggatgtggtaacggtaggttttgtgacgaggggaagcagctgcattgtcatgcaattaaggttggatgggtagaagctaatttatttgctgctaatgctttggtggatttttactgtgtttgtgggaatttgattgacgctaagaaatcatttgaagctattcgagatgaggatgtcatatcatggaattcaattgtttctgtgtttgctgctagtggtttgctttctgatgctcttgaactatttgctaggatgcagtcatgggggaagaagccgtccatccgttcatttgtgggattcctaaatgcagctattggatgtgacaatattatttttgggaagcaaattcagagtcatgttgtgaaattgggttttgctcctgggagtgtccatgttgaatctgccttgatcaatatgtatgggaaatgtggcgacatcaaaagctcagtatctgtgtttgagagtgtgcctgagagaactctggagatctgcaactcactgatgtcatctttgttgcactgtggtattgttgaagatgtgctggagttgtttggtttaatggttgatgagggaattggagttgatgaagtcactttgtccacttcactaaaggcatcgttagtatctgcttttggaagtttggcatgctgtagattgctgcattgttgtgcaataaaatcaggttttgaatttgatactgcagtttcatgttctttaattgatgcatattcaaaatatggtcatgtcgaactttcacatcagatttttgaacaacttcattcaccaaatgcaatatgtttcacttcaatcattaatgggtatgcacggaatggaatgggcagagaaggccttgaaatgcttgaaatcatggctaaacagggcctgaaaccagatagagtgacatttctgtgtgcattgacagggtgcagtcattcagggttggttgaagaaggaagatcggtgtttaactcaatgaagagtattcatggcattcacccagatcagcagcattattcatgtatggtagatcttctgggtcgtgcaggtctgttagatgaagctgaaggactgttaaaacatgccccagcaaagagcgattctgtgatgtggagctcactgctgcaaagttgtcggatccatggtgatactatagtaggaagaagagcagcaaaagtcttgatggagctggaacccgaggaccctgcaacttatttgcaagcttcaagcttttactctgaaattggggagcttgagatctcaatgcaaatcagagagattgcaattgcaagaagaatgaagagagagatgggtcacagtttaattgaggtgaacagtcacagttaa

SEQ ID NO: 144 - DNA, 869 bp, Zea mays
  source 1..869: mol_type = genomic DNA
atgggtagctcactgcagtctgatggaaattggagagatgcctgctgcttggacccttccctctgcaccaacttgacaatcccacaaatttgcatggtccagaatcttatagagcgctgccttcagatgtacatgaacaagaaagaagtggttgatgccctctcccaccactccaggatagagccttgtatcactgaacttgtttggcaacaacttgagcaacagaatcctctgtttttcaaagcatacgatatgaggctaatgcttaagaatcaaataatggtcttcaacaggcttctccaggatcagttcgagattatgaataaagagttttcttcagggatcccttctatgtctcttcctaatgactctaattccaacctattgaagcaagattcatgctttttgccagagactgctcctggaaatgcaatgccagatggtataatgcacaatggaagttcaagtggtataataaatgacacaccatctggcgatcagttacttaatgctagtaaagacttgcatggccttcatagtcaaatagatgcttcaactagtctacagtcagaccagaatgcaactgctgtgctgtatggtgtagacaacgagacaagcgcaacaataaagaccgagtcttgctactcgagtaatgctgattttgccttctgtgggaacactttcctggaatcatgccagtcgataggtgatgcatctggtggtggatccttcagcagctcagagttgaatgggcaaccactaaacgattcaattttggatatggagtcatcatcatttagcttcttgaaccaaatgccccaaagcttcatgttttcagacctggcagatgatttcaaccaaaatgcaga

SEQ ID NO: 145 - protein, 662 aa, Beta vulgaris
MQHIKRLSYATQIGRLKFPNYWKICAFSRFLHLDSYYNTDASELIFSYNRTIENHINSGSLAFAHQLFDEMSLRDAVSWNLLISGYKRYRIPDKALELYTEMVSQGFRENPSTFSSVMSICSNGGFLFEGVQVHCRVISLGFCRNMYIGCSIVDLYMQMGYVDDGLKALDEMPERNVAAWNSVFRGFCVLGLWDEIIRQFPRVKGDGVELNELMVCYMLQGCCNGNFVSQGQQLHCHAFKAGLVESNRFVANALVDFYSACGTLSDAQKSFEVIPQDAVISWNSIVSAYANNGMLFDALECFEAMQYWSMKPSVRSLVALMNSCSRRENLSLGRQLHCFVLKLGFDRGSIHVVSALIDMYGKCYEMGTSFNVYEECHYKTMECCNTLLTSMLHCTYTEEVVELFRFMVDEVIEFNEFSLSTTLKALSGSSFAGLASCQLIHSLAIKHGFESHIVVSCSLIDIYSKFGQVDDSNCVFEGLLSHSVFSFTSIINGYARNGLGRECLKLLEVMLQKGLKPDRVTFLCVLTGCNHSGLVEEGRKVFESMNTLYDIEPDQRHYSCMVDLLGRAGLVYEAEELLKLSYVKDNSFMWSSLLRSCRIHKNDVVGQRVAKRLMELEPGNSGVYMQVSNFYLEVGNSEMSMHYKEIGKARQLVREMGRSFIV

SEQ ID NO: 146 - protein, 959 aa, Brassica rapa
MSLRDVITYNLMISGNSRNGCSVKAFELYAEMVSHGLRESASTFPSVLSVCSSDEWLCREGIQVHCRVIFLGFECNMFVRSALVGFYASLRLVDVALKLFDEMPERNLAVCNLMLRCFCESGDSKGLFGVYRWMGVEGVDENGLSYCYMIRGCSNDRLLCEGKQLHCLVVKSGWNVCNVFVANALVDLYSACGDLYGSKTSFEAVPEQDVISWNSIVSVFSDYGSVLESLGLFRKMQFWGKRPSVRSFMSFLSFCSRNNDTQSGKQIHCCVLKMGFDVSSLHVQSALIDMYGKCNDIESSVSVHQSLPCLTLECCNSLMTSMMHCGIAKDIIEMFGLMIDEGTGIDEVTLSTVLKALSVSEAVTSHSCTLVHCCAIKSGYASDAAVSCSLIDAYSKSGQNEVSRKVFDELDSPNVFSWTSIINGYARNGMGRDCVEMLKEMDRKNLVPDEVTILSVLSGCSHSGLVEEGEVIFNSLESKYGIVPGRKLYACMVDLLGRAGLVEKAEKLLFKARGDAADYCIAWSSLLQSCRVHGNEAIGRRAAEVLIDLEPDNFGVYIQVSKFYFEIGDFEISRRIREIAASRELMREIGYIVTAYGAAKKMVYTDLDILEKLVNFDIPEDDAGDDYDSKVFDLPSFSSGKNLVSVDTFGAAGDGVSDDTQAFVSAWNKACGTPKSVLLVPQGRSYLINATKFNGPCEQKLVIQIDGTIVAPDEPSNWDPKLQRTWLEFSKLEGIVFQGNGVIDGSGSKWWAASCKKNKSNPCKSAPTALTIDSSSGVKVSGLTIQNSQQMNFIIARSDSVRVSKVMVSSPGDSPNTDGIHITGSTNVVLQDCKIGTGDDCVSIFYCDNPTSCQNQTSAVKISQIMYRNITGTTKSEKAIKFACSDTVPCSHIVLNNVNLEGKDGQVEAYCNSAEGFGYGVIHPSADCLYSHDDKGFDQSHTSGPVLVTEEAEIGHDEL

SEQ ID NO: 147 - protein, 663 aa, Brassica oleracea
MRGAQALNFLRKTTTLAQHIRSTAATRLEFGSCLEANPSDLVYTHNCKIDDLLKSGDLISAHEVFDEMSLRDVITYNLMISGNSRNGCSVKAFELYAEMVSHGLRENASTFPSVLSVCSGDEWLCREGIQVHCRVISLGFECNMFIRSALVGLYTSLRLVYVALKLFDEMPERNLAVCNLMLRCYCENGDSKGLFGVYRRMGVEGVDENGLSYCYMIRGCSNDRLLCEGKQLHSLVVKSGWNVCNIFVGNALVDLYSACGDLYGSKTSFDDVQEQDVISWNSIVSVFADYGSMLESLDLFRKMQFWGKRPSVRSFMSFLNFCSRNSDTQSGKQIHCYVLKMGFDVSSVHVQSALIDMYGKCNDIESSVSVHQSLPRLTLECCNSLMTSLRHCGITKDIIEMFGLMIDEGTGIDEVTLSTVLKALSLSEAVTSQSCTLVHCCAIKSGYASDAAVLCSLIDAYSKSGENEVSRKVFDEIDSPNVFCWTSIINGYARNGMGRDCVEMLKEMDGKNLVPDEVTILSVLSGCSHSGLVEEGEVIFNSLESKHGIVPGRKLYACMVDLLGRAGLVEKGEKLLLKARGDADCIAWSSLLQSCRVHGNEAIGRRAAEVLMDLEPDNFAVYIQVSKFYFEIGDFEISRRIREIAASQELMREIGYSSVILRN

SEQ ID NO: 148 - protein, 598 aa, Capsicum annuum
MPKRDVVTWNIMISGYSHNRFPRKSLRLYNKMVSQGIKENSSTFSSMLSICGNAGLYKEGIEIHSRVVVLGFSMNIYIASALVNMYIQMGLRDVAFKLFYDLPKRNLPVWNLVLRGICELGGSSTEFLRLYSDMKLENVEPNGLTYSYLIHGCCKKRLLDKGTQLHSHVIKTGWLESNVFLANALVDFYSACGILVDADKAFECIPRQDVITWNSMVSVYAANDLFHEAVRVLEEMRLWDKHPSAMSFIALLNLTSRRKELLLGKQMHNFVIKLGLDYGSVLIQSALIDMYGKNHDIQSSITAFQCTRETSLECCNSMMTSLLHLGFFQDVFEIFSRMVCENIVFDEVSLSSTIKALSLLSTPNLDNCALLHCCAIKSGFDSDSVVLCSLIDAYSRSGHLRFSQQTFEALPSPNIIGFTSIINAYARKGMGSQCLAVFAEMIQKGLKPDKVTFLCILLGCNHSGLVEEGKKIFEFMRTFHEVYPDRRHYSCMVDLLGRTGLLNEAEELLMSASSSGDSIMWSSLLRSCRIHQNEHVGRRAAKRLMDLELEDPSFWLQASNFYFEIGEFETAVYIREVAVARKMSRDIGYSLIRVHEFH

SEQ ID NO: 149 - protein, 650 aa, Chenopodium quinoa
MPKLLGVLCRKVPAIFRRLHLDSYYKTDISELIFLNNRAIDNHIRSGSLASAHQLFDEMSLRDVVSWNLLISGYKRYGMPVKAFELYSEMVFQGFSESPSTCSSVMSICSNNGFYFEGIQVHCRVISLGFCGNLYIGGSIVDLYMQSGFVDDGLKFLDEMPERNDGVWNSVFRGFCKLGLWDEVIRQYSRVKFDGVVLKDLMVCYLLQGCCNGNFVIQGEQLHCHALKAGLVESNRFVANALVDFYSACGTLIDALKSFEVIPYNAVISWNSIVSAYANSGVLFDALECFVRMQYWSMKPSVRSLVALLNSCSKSRNLVVGRQLHCFALKLGFDCGSIHVQSALIDMYGKCYEIESSFNIYEECFYKTRECCNALLTSMLHCTCAEEVVELFKFMVDEGIEFDEFSLSTALKALSGSSFVSLTSCTLLHSLAIKNGLESHIVVSCSLIDVYSKLGQVDHSHSIFEGLRSPNVVSFTSIINGYARNGLGRECLKLLKMMFRKGLEPDRVTFLCVLTGCNHSGLVEEGRRVFESMKSPHGIEPDQRHYSCMVDLLGRAGLVYEAEELLKLSFVKDDSFMWSSLLRSCRMHKNKVVGQRVAKRLMELEPENSAACLQVSNFYHEVGDSELSMQYREIGMARHLVREIGHSFIV

SEQ ID NO: 150 - protein, 667 aa, Citrullus lanatus
MRKVRKFASFVRTITTVTYEFVATTPPIHPPQPYSHSGVHARDAIYLKNREINEVIKLGHLDSAIKLFDEMPLHDVVTYNLLISGCLRNGHPERAFGLYSQMVLRGIRESASTFTSVLGTCSNIDFFKEGSQIHCRVVSFGFTLNLFIASSLIDFYMRMGLHTVALKVFDELPQRNIAVWNLLLRRYCELSQFEKLLGLFSKMQLEGVEPNGLTFCYLLRGFGNERLLDEGKQLHSRAVKIGLVESNIFVPNALVDFYSDCRSLTEAKRAFECIPLDDVISWNSIVAVYADIGFLSESLELFSRMQFWGKRPSIRSLMALLNLSSRTRNIQLGKQIQSYALKLGFGHESSHLQSALINMYGKCLDIESSVAVYESTSVRTLECCNSLMTSLLPCGIIEDVIEMFGLMVDERIGLDEVTLSTTLKAVSMSSPSDLTRCRLLHCCAIKSGFDFNFVVSCSLIASYSRCGHVELSCKVFEEIHSPDVICFTSIINGYARNGLGREGVEMLKTMIQKGLKPDKVTFLCALIGCNHSGLVEEGRFVFELMKNLYGIEPDWKHYSCMVDLLGRIGLLDEAEKLIQKVPEKVNGVIWSSMLRSCRIHRNGTIGRKIAKSLVDLEAEDPAILLQASNFYSDIGDYETSKQLREIALIKKVVREIGHSLIEVKSYC

SEQ ID NO: 151 - protein, 663 aa, Cucurbita maxima
MRKVREFASFVRTITTVTSEFVSIHLPRPYSYSSVHAPDAIYLKNREIDRLIKFGHLSAAIKLFDEMPLHDVVTYNLLISGCFRHGHPERAFGLYSQMVLRGIRESASTFTSVLGTCSNADFSKEGSQIHCRVVFLGFSLNLFIGTSLIDYYMRMGLDIVALKLFDELPQRNIAVWNLLLRRFCELGQFEKLLGSFSKMQLEGVEPNGLTLCYLLRGVGNERLLDEGRQLHSRAVKIGLVESNIFVPNALVDFYSDCRSLTEAKKAFECIPLEDVISWNSIVAVYADIGFLSESLELFSRMQFWGKRPSIRSLMAFLNLSSRTRNIQLGKQIQSCALKLGFGHESSHLQSALINMYGKCFDIESSVAVYESISVRTLECCNSLMTSLLHCGVIEDVIEMFGLMADEGIGLDEVTLSTTLKALSMSSPTDLTGCRLLHCCAIKSGLGFNSVVSCSLMDSYSRCGHVELSCKVFEEIHSPGVICFTSIINGYARNGMGKEGIQMLKTMIQKGWKPDKVTFLCALIGCNHSGLVEEGRFVFELMKTVCGIEPDWKHYSCMVDLLGRVGLLDEAEKLLLKVPEKVNGVSWSSMLRSCRIHRNEIIGRKIAKSLVDLEAEDPAALLQASNFYSDIGDFETSKQLREVALTKKVIREIGRSLIEVKSHC

SEQ ID NO: 152 - protein, 667 aa, Cucumis melo
MRKVTKFASFVRTITAVKSEFVATTSPVHLPHPYSRLGLHFHARDLIYLKNREINKLIKLGHLDSAIKLFDEMPLHDVVTYNLLISGCLQNGHPQRAFGLYSQMVLRGIRESASTFTSVLGTCSNMDFFKEGSQIHCRVVLFGFTLNLFIASSLIDFYMRMGLDTIALKLFDELPQRNIAVWNLLLRRCCELRQFEKLQGFFSKMQLEGVEPNGLTFSYLLRGFGNERLLDEGKLLHNRAVKIGLVESNIFVQNALVDFYSDCRSLTEAKNAFECIQLDDVISWNSIVAVYADIGFLSESLELFSRMQFWGKRPSIRSLMALLNLSSRTRNIQLGKQIQSCALKLGFGHESSHLQSALINMYGKCLDIESSVAVYESISVRTLECCNSLMTSLLHCGVIEDVIEMFGLMVDERIGLDEVTLSTTLKALSICSADLSRCRMLHCCAIKSGFEFSSVVSCSLMDSYSRCGHVELSWKVFEEIHSPGVICFTSIINGYARNGLGREGVEILKMIIQRGLEPDKVTFLCALIGCNHSGLVEEGRFVFELMKTYRIEPDWKHYSCMVDLLGRAGLLDEAEKLIQKVPEKVNDVIWSSMLRSCRIHRDETIGRKIVRSLVDLKAEDPAILLQASNFYSDIGDFETSKQLREIALTKKVVREIGRSLIEVKSHC

SEQ ID NO: 153 - protein, 663 aa, Cucurbita pepo
MRKVREFASFVRTITTVTSEFVSIHLPQPYSYLSVHAPDAIYLKNREIDRLIKFGHLNAAIKLFDEMPLHDVVTYNLLISGCFRHGHPERALGLYSQMVLRGIRESASTFTSVLGTCSNTDFSKEGSQIHCRVVFLGFSLNLFIGTSLIDYYMRMGLDIVALKLFDELPQRNIAVWNLLLRRFCELGQFEKLLGSFSKMQLEGVEPNGLTLCYLLRGVGNERLLDEGRQLHSRAVKIGLVESNIFVPNALVDFYSDCRSLTEAKKAFECIPLEDVISWNSIVAVYADIGFLSESLELFSRMQFWGKRPSIRSLMAFLNLSSRTRNIQLGKQIQSCALKLGFGHESSHLQSALINMYGKCFDIESSVAVYESISVRTLECCNSLMTSLLHCGVIEDVIEMFGLMADEGIGLDEVTLSTTLKALSMSSPTDLTGCRLLHCCAIKSGLGFNSVVSCSLMDSYSRCGHVELSCKVFEEIHSPGVICFTSIINGYARNGMGKEGIEMLKTMIQKGWKPDKVTFLCALIGCNHSGLVEEGRFVFELMKTVCGIEPDWKHYSCMVDLLGRVGLLDEAEKLLLKVPEKVNGVIWSSMLRSCRVHRNETIGRKIAKSLVDLEAEDPAALLQASNFYSDIGDFETSKQLREVALTKKVIREIGHSLIEVKGHC

SEQ ID NO: 154 - protein, 668 aa, Cucumis sativus
MRMVSKFASFVRTITPVKSEFVATTSPIHLPHPYSPLGLHVHARDLIYLKNRQINKLIKLGHLDSAIKLFDEMPLHDVVTYNLLISGCLHNGYPQRAFGIYSQMVLRGIRESASTFTSVLGTCSNMDFFKEGSQIHCRVVLFGFTLNLFIASSLIGFYMRMGLHTVALKLFDELPQRNIAVWNLLLRWCCELRQFEKLQGFFSKMQLEGLEPNGLTFSYLLRGFGNEKLLDEGKQLHNRAVKIGLVESNIFVQNALVDFYADCRSLTEAKNAFECIPLDNVISWNSIVAVYADVGFLSESLELFSRMQFWGKRPSIRSLMALLNLSSRTRNIQLGKQIQSCALKLGFGHESSHLQSALINMYGRCLDIESSVAVYESISVRTLECCNSLMTSLLHCGVIEDVIEMFGLMVDERIGLDEVTLSTTLKAISICSPDLSRCRLLHCCAIKSGFEFSSVVSCSLMDSYSRCGHVELSWKVFEEIYSPGVICFTSIINGYARNGLGKEGVEILKMMIQRGLKPDKVTFLCALIGCNHSGLVEEGRFVFELMKTLYGIEPDWKHYSCMVDLLGRAGLLDEAEKLIQKVPEKVNGVIWSSMLRSCRVHRNETIGRKIVKWLVDLEAEDPAILLQASNFYSDIGDFETSKQLREIALTKKVVREIGHSLIEVKSHC

SEQ ID NO: 155 - protein, 666 aa, Daucus carota
MRSKKLVNLTRAISTIACKNNPTTIPLTSLQLDTYIQPSDRDTIYSYNKAIDYQVKYGSLSYAHQLFDEMIVRDVVTWNAMISGYNKCGFFEEAVWLYRQMVVEGVCESSSTFSTVLSVCCNAGWCRRGLEVFSRAVVLGFGLNVFVVSAVISVYMGMNFFDVGFRLFSGLSERKLAVWNLVLRGCCDSGRSRELFGVFRSMGEEGVRGNALTFCYMIRGCGNDELVEEGKQVHCHVVKNGWCEVNIFVKNALVDFYSACGCLLDAEKSFVVISPKDLISWNSMVSAYGNGGLIFEALEIFSKMQYWGKKPSVRSFVGLLTLCREEKNIVLGNQIHCFVKKTGFDVGSAYVQSALIDMYGKCGEIETSVSIFQGDHEISLESCNSMMTSLLQYDMFDDVVELFAMMLAKGIRFDEVSISTTLKALSLSNCASLMGFLMLHCCVIKSGFVINSAVSCSLIDAYSRSGHVKCSHQIFEELPSVNVVSFTSIINAYARNGMGMQGLGMLKEMTEKDVKPDKVTFLCVLNGCNHSGLVEEGKMVFDLMKTVYNIPPDLKHYSCMVDLFGRAGLLEDAEELLKQAPRKDDSVLWSSLLRSCRIHRNEDVGRRVTTILMDLEPEDPEIWLQASNFYAEIGEFETSSHIREVAVARKMRLDIGNSLIETRGHL

SEQ ID NO: 156 - protein, 662 aa, Eruca vesicaria
MRGAQALNFLRRTTTKLAQHIRYTSAATRLEFGSCLEENSNDLVYTHNRKIDDLLKSGNLLSAHEVFDEMSLRDVVTYNLMISGNSRKGCSVKAFELYAEMVSNGLRESASTFPSVLSVCSGLCREGIQVHCRVISLGFECNMFIRSALAGLYASLRVFDVALKLFDEMPERNLAVFNLMLRCYCESGDSEELFGVYRRMGVEGVDENGLSYCYMIRGCSNDRLLCEGKQLHSLVVKSGWDVCNIFVANALVDLYSACGDLYGSKTSFDAVPEQDVISWNSIVSVCVDYGSVLESLDLFRKMQFWGKRPSVRSFMSFLNFCSRNCDIEFGKQIHCYVLKMGFDVSSLHVQSALIDTYGKCDDIESSVSVYQSLSCLTLECCNSLMTSLMHSGITKDIIEMFGLMIDEGTGIDEVTLSTVLKALSLSEEVTSQSCTLVHCCAIKSGYASDAAVSCSLIDAYSKSGQNEVSRKVFEELDVPNVFCWTSIINGYARNGMGRDCVEMLKEMDRKNLVPDEVTILSVLSGCSHSGLVEEGELIFNSLESKYGIVPGRKLYACMVDLLGRAGLVEKAEQLLLEARGDADCIAWSSLLQSCRIHGNEAIGRRAAEALMDLEPDNFAVYIQVSKFYFEIGDFEVSRGIREIAASRELMREIGYSSVTVRN

SEQ ID NO: 157 - protein, 662 aa, Eruca vesicaria
MRGAQALNFLRRTTTKLAQHIRYTPAATRLEFGSCLEENPNDLVYTHNRKIDALLKSGNLLSAHEVFDEMSIRDVVTYNLMISGNSRNGCSVRAFELYAEMVSNGLRESASTFPSVLSVCSGLCREGIQVHCRVISLGFECNMFIRSALVGFYASLRVFDVALKLFDEMPERNLAVFNLMLRCYCESGDSEGLFGVYRRMGVEGVDENGLSYCYMIRGCSNDRLLCEGKQLHSLVVKSGWNVCNVFGANALVDLYSACGDLYGSKTSFDDIPEQDVISWNSIVSVCVDYGSVLESLDLFRKMQFWGKRPSVRSFMSFLNFGSRNCDIEFGKQIHCYILKMGFDVSSLHVQSALIDMYGKCNDTESSVSVYQSLPDLSLECCNSLMTSLMHSGITKDIIEMFGLMIDEGTGIDEVTLSTVLKALSLSEEVTSQSCTLVHCCAIKSGYASDAAVSCSLIDAYSKSGQNEVSRKVFEELDAPNLFCWTSIINGYARNGMGRDCVERLKEMDRKNLVPDEVTILSVLSGCSHSGLVEEGELIFNSLESKYGLVPGKKLYACMVDLLGRAGLVEKAEKLLLKARGDADCIAWSSLLQSCRIHGNESIGRRAAEALMDLEPDNFAVYIQVSKFYFEIGDFEVSRGIREIAASRELMREIGYSSVTVRN

SEQ ID NO: 158 - protein, 668 aa, Glycine max
MLVSTLKPWWSWMQKPLLHSFIRAITTLTPIPPHTFLHLHNPSDSVIYLKNREIDAFIKLRNLNAALAVFHTTPLRDTVTYNLIISAFRNQPNHALRFYAEMGLRGIRESPTTLTSVIAVCTNAMFFKEGVQVHCRVIKFGFTCNVFVGGALVGFYAHVGECGVALDLFDELPERNLAVWNVMLRGLCELGRVNVEDLMGFYYPRMLFEGVQPNGVTFCYLLRGCGNQRRLEEGKKIQGCVLKMGLVESSVFVANALVDFYSACGCFVGARRCFEDIENEDVISWNSLVSVYAENNMLIEALEVFCVMQVWRKRPSIRSLVGLLNLCSRSGELCLGKQVHCHVMKFGFDEGSVHVQSALIDMYGKCMDIESSVNVFECLPKRTLDCFNSLMTSLSYCDAVDDVVELFGLMFDEGLVPDGVTLSTTLRALSVSTLASFTSSQLLHCYALKSGLGGDAAVACSLVDSYSRWGHVELSRRIFESLPSPNAICFTSMINAYARNGAGKEGIAVLQAMIERGLKPDDVTLLCALNGCNHTGLVEEGRLVFESMKSLHGVDPDHRHFSCMVDLFCRAGLLHEAEELLLQAPGKGDCFMWSSLLRSCRVHKNEEVGTRAAQVLVELDPDDPAVWLQASIFYAEIGNFDASRQIREVALSRKMTREIGHSLTEIRQ

SEQ ID NO: 159 - protein, 664 aa, Helianthus annuus
MRKQIMVSIAPLVSTFTHKFVRNASTTSSFFPSQFDSYFEHNPRDKIYTYNRDIETLMKSGSVDHALQLFDEMPMRDIITYNIVLSGLKRNGLSKEALYVYNQMVSQGFIESSSTFSTVLGVFSQEGLYQEGFQVHNRVVVLGLSLNVYVGSALIDLYMNMGLVDLALRLFNDLPERNLATWNQLLKGFGEFGMSQKLQLYYRMKREGVAPNPLTFCYLLRSFGNESVVDQGRELHSYTIKVGWAESDVFVSNALVDFYSACGSITDAEKSFEVIPTNDVISWNSLVSLYASNEIASDALRIFSMMQVSGKKPSIRSFVGLLNLSSRNVNIIIGKQIHCFVLKLGFDHGSCYVCSALIDMYGKCGEIESSVSIYESVPRKTIEVCNSLMTSFAHCGIVEDVIELFGLMVDEDIGFDEVSLSTTVNTLSRSTYAGLTSCKLLHLCAVKSGFAHDLAVSCSLIESYSRFGDVKSSRQIFNQLSSPNVICFTSIISAYSRNKMGTECYKLLEVMINKGLKPDKVTFSCVLTACNHSGMVHEGKMVFESMKTVHGVDPESQHVACMVDLLGHKGLLEEAERLLKQTQFNNDSAIWSSLLRHCRAHHNETVGKRIAETVIKLEPENASSWLQVSNFYSEIRDFETAKQIKDVALARRMQRDMFTPLRFK

SEQ ID NO: 160 - protein, 314 aa, Humulus lupulus
MYGKCGDIERSVAIYENVKERTLECCNSLMTSLMHCGCTGDVVEMFGLMVDEGIGTDEVTLSTTLKALSVSVLTSLASFKMVHCCAVKLGLESDLAVSCSLIDAYSKCGHINYSRMVFEQLQTPSTICFTSIINGYAQNGMGSEGLNLFQAMIHKGLKPDKVTFLCALAGCNHSGLVKEGKMLFDSMKTSYGICPDRQHYSCMVDLFGRAGLLEEAEELLIKAQGNENSMMWSSFLRSCRVHKNEKLGRRAAKVLMELEPENPAICLQVSNFYSEVGEFSTSMEIRELAMARKVTREIGHSLIETRNPSSKLQS

SEQ ID NO: 161 - protein, 475 aa, Lactuca sativa
MRKKILVSVAPLIPTFTPTFLRNASTIPVFFPSQFDSYFQPNPRDTVYTCNRDIQRYMKLGSIDSALTLFDGMPIRDAVTWNLIISGHKHNGFSREALYFYTQMVSQGFIESSSTFSTVLGVFSDEGLYREGLQVHGRAIVLGLSLNVYVGTSLIDLYMNMGLVSFALRLFNDLPERNIATWNQLLRGFRVFGRSQKLELYYRMKSEGIVPNPLTFCYLIHGFGNERLINEGKELHSYAIKVGWAESEFFVSNALVDFYSACGILTDAKRSFQIIPTNDVISWNSLVSVYAYNGLASNALEIFSTMQTCGKKPSIRSFVSLLNLSSGSSNILLGKQVHCFVLKLGFDHGSIYIQSALIDMYGKYGEIESSVSIYENVPVKTLEVCNSLMTSFAKCGVVEDVIELFGLMVDEGIGFDEVSLSTTFNALSKSCFGSLTNCKLLHNCAVKSGFDHHPAVSCSLLSSYSKFGRVKSIGS

SEQ ID NO: 162 - protein, 678 aa, Nicotiana tabacum
MELAILGLWHSKAGYRADYAWPVARLGYVTTLSHKCQQNSQQPTLPLDFCSVSNYDVYSLNRTLRDLVKYGSLTSALHLFEEMPKRDVVTWNIMISGYSHYGFPRKSVYLYNKMVSQGIRENSSTLSFILSICANAGLYKEGLEIFSRVVVLGFSMNLYIASALVNMYIQMGLIDVAFKVFYDLPKRNLPVWNLVLRGISEAGKPSEFLRLYGDMKLENVEPNGLTIFYLIRGCCKERLLDKGREIHSLVIKTGWLESNIFLANALVDFYSACGILVDTNKAFQCIPPQDVISWNSMVSIYAAKDLLHEAVQVLDEMRSWDKHPSAMSFVALLNLSSRKKELLFGKQVHSFVMKLGFDYGNVLIQSALIDMYGKNDDIENSVSVFQSNPIRSLECCNSMMTSLLHLGVPQDVFELFSWMVCENITFDEVSLSSTIKALSFYSSPSLDSCDLLHCCAIKSGFDFDIMVLCSLIDAYSRSGQIRYSQKIFEAFPSPNIIGFTSIINAYARKGMGSECLGLFEEMIQKGLKPDEVTFLCILLGCNHSGLVEEGKKIFDSMRLHGVFPDRRHYSCMVDLLGRAGLVIEAEELLNHASSTGDSVMWSSLLRSCSIHQNEHVGRRAAKKLMDLEPEDPSVWLQASNFYSEIGEFETAIYIREVAVASKMSRDIGYSLIRLHECH

SEQ ID NO: 163 - protein, 656 aa, Ocimum basilicum
MARTSAAKFWSKHKPAFVYSFSHPVRAITTINSAANADIYAHNRIISDLMKSGSLDSAVKMFDEMTERDVITWNTMVSGHYRRGFLKESLNLYNQMISQGFIENSSTFSTVLSICSSAGLFREGCEVHCRAAVLGFSTNVYIGSALVDLYLQMGCIDVALRLFGTLQERNLATWNVVLRGLCEMGRVKELFRLYNEMKLEGLEPSGLTFCYLVRSCGNERCLDEGMKLHCCVIKRGLVDSNLFVANALVDFYSACGNLAETKKLFEVIPPADVISWNSMVSVCAANGYASDGLVIFRAMYLSGKKPSACSFLGFLKLSSSTKNLVFGKQTHCCILKAGLYSVLVQSALIDMYGKCGDIDSAACVFDSVPERSLECCNSLMTSLLKSGLTEDVIDLFGLMVDEKIGYDEVSLSSSLKAISLSLPTGCSLLHCCTIKSGFESDVAVVCALIDAYSRSGEVKFSLQIFSQLSSPNVICFTSVISALARNGMGKECLEMLDAMIQNGLKPDKVTFLSVLMGCNHSGMVEEGRWVFYSMQTQHGVKPERQHYSCMVDLVGRAGLLDEAIEILNNSPWKEDFVIWSSVLRSCRVYQDKQLGYKAAKMLIDLEPENPSSWLQASYFHSDMGDFETMKQYREIAVARKVTREIGRSMIQVRHHC

SEQ ID NO: 164 - protein, 1082 aa, Phaseolus vulgaris
MQKPQFLSFLRAITTVPHTFLLTDSLYLKNRELHALIKRRDLNAALPLFHSMLLRDTVTYNLIISGLREQPEYALRFYAEMGSLGIGESSTTFSSVVAVCTNAAFFREGVQVHCRVVKLGFSCNVFVGGALVGFYTRMGLSRVALELFDELPERNLAVWNVMLRGLCELLRVKVEDLLGFYSRMRFEGVEPNGVTFCYLLWECCKQRRLHEGKTIHGCVWKVGLVESNVFVANALVDFYSACGCLVGARKCFEAIENANVISWNSLVSVYAENSLLREAFEVFSVMQLWGRRPSIRSLVGFLNLCSRSGELCFGKQVHCLVMKMGFDEGSVHVQSALIDMYGKCRDIEGSVAVFECLPKRTLECFNSLMSSLSHCEAVEDMVELLGLMVDEGLVPDEVTISTTLKALSVSALASFTSSQSLHCYALKSGLGGHAAVACSLMDAYSRSGHVDLTRRIFESLPSPSAICFTSMINAYARNGMGKEGIAVLQAMIERRLRPDKVTFLCALSGCNYTGLVEEGRVVFESMKALHGVNPDRRHFSCMVDLLCRAGLLYEAEELLLRAPGKRDSFMWSSLLRSCRVHKNEEVGTRAAQVLLELDPGDPAVWLQASNFYAEIGKFDESRQIREVALARKMTREIGHIHGVAGSMMYDSIGMLEELKSLDSIDIEEETEVELSDIPSWRSEHGGKVLVNIDSFGAAGDGESDDTEALQKAWGVACSTPKSVLLIPQGRRYLVNATRFKGPCADKLIIQIDGTLVAPDEPKNWDPKLPRVWLDFSKLDKAVFQGSGVIDGSGSKWWAASCKKNKSNPCKGAPTAFTIDTSTSIRVKGLTIQNSQQMHFTISRCDSVRINGVKVSAPGDSPNTDGIHISESTNVIIQDSKIGTGDDCISIVNASSNIKMKRIYCGPGHGISIGSLGKDNSTGIVTKVILDTAVLRETTNGLRIKTWQGGSGYVRGVRFQNVRVENISNPIIIDQFYCDSPSSCQNQTSAVEISEVMYQNISGTTMSAKAIKFDCSDTTPCSNLVLSNVDLDKQDGTVETYCHSAQGFPYGVVHPSADCLSSTDKISQVAESTMEEDIRHTEL

SEQ ID NO: 165 - protein, 383 aa, Solanum lycopersicum
MVSVYAANDLLREAVRALEEMRLWDKNPSSMSFVALLNLSSRGKELLFGKQIHNFVIKLGFDCESVLIQSALIDMYGKNDDIQSSITVFRCSRERSLECCNSMMTSLLHLGFLHDVFELFSQMVCENIMFDEVSLSSTIKALSLYSSPSLDNCCLFHCCAIKSGFDSDSMVLCSLIDAYSRSGQIRFSQQIFEALRSPNIFGFTSIINAYAQKGMGYECLAVFEEMIQKGLKPDKVTFLCILLGCNHSGLVEEGKRIFDSMRTLHDVYPDRRHYSCMVDLLGRAGLVNEAEELLMHGSSEGDSVMWSSLLRSCRIHQNEHVGRRAAKRLMDLEPEDPSFWLQASNFYSEIGEFEAAVYIREVAVARKMSRDIGYSLIRVHEFH

SEQ ID NO: 166 - protein, 597 aa, Solanum tuberosum
MPKRDVVTWNIMISGYSHNGFPRKSLHLYNKMVSNGIIENSSTFSSILTISANAGLFKQGVEIHSRVVVLGCSMNLYVASSLVNMYIKMGFIDFAFKLFYDLPKRNLPIWNLVLRGICELGRLSEFLRLYSDMKMENVEPNGVTFCYLIHGCCKERLVDKGRQLHSHVIKNGWLESNIFLANVLVDFYSAFGILVDADKAFECIPPQDVISWNSMVSVYAANDLLHEAVRLFEEMRLWDKHPSAMSFVALLNLSSRGKELLFGKQIHNFVIKVGIDYGSVLIQSALIDMYGKNDDVQSSIDVFQCSHERSLECCNSMMTSLLHLGFLQDVFELFSWMVCENIVFDEVSLSSTIKALSLYSSPSLDNCCLLHCCAIKSGFDSDSMVLCSLIDAYSRSGQIRFSQQIFEALPSPNIFGFTSIINAYAQKGMGYECLAVFEEMIQRGLKPDKVTFLCILLGCNHSGLVEEGKMIFDSMRTIHDVYPDRRHCSCMVDLLGRAGLVNEAEELLMHASSEGDSVMWSSLLRSCRIHQNEHVGRRAAKRLMDLEPEDPSFWLQASNFYSEIGEFETAIYIREVAVARKMSRDIGYSLIRVHEFH

SEQ ID NO: 167 - protein, 667 aa, Vitis vinifera
MQRRNLLFFPRSITNTSLNFTSTASSPSASLLLDSYCETNPHVDLYSNNRAIDSLIKSGSLASALHLFEKMPIRDVVTWNLLINGYRQHELPKQAFQYYSEMVFQGIRESSSTFSSVLSVCSNAGLHQEAIQVHSRVIFLGFSSNLYVAGSLVDLYMQMGDCDTALRLFSNLPRRNLAICNLVLRGFCELSRSEWLFTMYSAMKEECVKPNGLTFCYLIRGCGNGRFCDEGKQLHCHAIKVGWVEANLFAANALVDFYCVCGNLIDAKKSFEAIRDEDVISWNSIVSVFAASGLLSDALELFARMQSWGKKPSIRSFVGFLNAAIGCDNIIFGKQIQSHVVKLGFAPGSVHVESALINMYGKCGDIKSSVSVFESVPERTLEICNSLMSSLLHCGIVEDVLELFGLMVDEGIGVDEVTLSTSLKASLVSAFGSLACCRLLHCCAIKSGFEFDTAVSCSLIDAYSKYGHVELSHQIFEQLHSPNAICFTSIINGYARNGMGREGLEMLEIMAKQGLKPDRVTFLCALTGCSHSGLVEEGRSVFNSMKSIHGIHPDQQHYSCMVDLLGRAGLLDEAEGLLKHAPAKSDSVMWSSLLQSCRIHGDTIVGRRAAKVLMELEPEDPATYLQASSFYSEIGELEISMQIREIAIARRMKREMGHSLIEVNSHS

SEQ ID NO: 168 - protein, 288 aa, Zea mays
MASEEVLHKVQNLIERCLQMYMNKKEVVDALSHHSRIEPCITELVWQQLEQQNPLFFKAYDMRLMLKNQIMVFNRLLQDQFEIMNKEFSSGIPSMSLPNDSNSNLLKQDSCFLPETAPGNAMPDGIMHNGSSSGIINDTPSGDQLLNASKDLHGLHSQIDASTSLQSDQNATAVLYGVDNETSATIKTESCYSSNADFAFCGNTFLESCQSIGDASGGGSFSSSELNGQPLNDSILDMESSSFSFLNQMPQSFMFSDLADDFNQNAEITPFLTPETNFSDSTGGDHTG

SEQ ID NO: 169 - DNA, 2744 bp, Spinacia oleracea
  source 1..2744: mol_type = genomic DNA
atggcgcatcaggttcgaatttttcttcctaattatttgtgcaggctgtagatatcatcttattctttcaaattgcttaatttaatttaattattaaggccatgttcttgagattacaataatttcttatgagttactgttcttaatttctaaatttcttcattgagataattaaaaacagcaaaattaagcaagaatcataacaatacagttactgagtacatattaatactgtaataaataaatagtaattgtttttgtttttgtttccgtagatccagattccaatcaagatgatttcgattattgctaatttgtttgggataggaaggtatcaccgcggtgtaccgtgtgatggaggaactcttgataatcatcaatctgaattgagtagtgttcttatacaacctcaaaataaacgaagaaaagttgaggaatttctttggtttaatactgagtatgttgatagaattattggttggttaaaggatagtgagattgatactattggtgtttatgggatgggtggagttgggaagaccaccctcgcaactcagctccaaactcggctattgaatcatgttgttgcctgggtttctgtgggggtggattttactgtatataagttgcaacaagatattgccgggtcattcgggcttgatcttcaaggggatagggatgcgattagaagagcagctatgattagtgagtttttgtgtcgtaatcataactgtgtactcttccttgatgatttatggggtgatttccgtagagaagatgttggaattcccagaaaatgtaagttgattgtcatttctcggttgctggatgtgtgtcgtaagcttcgttgcaagaaggtagttaaggttgagccacttcaagaggaagagagttggcagttgtttaaccgtagcatagggtatggtgttttgaattctgtagatgtgtgtcgtattaggaagctcgtgtatgataagtgtgtaggtctccctcttgctatcactagtttagcaaccagtttgaggaagatggttgatgatgataatccttctagttggagggaagttctcgagaattttgatcttctatctgcgaaacaacctcacttggaagatacatttagtcagttgaggttgtcatacgaaaggttgaacaacaaactccagcgttgtttcctgtattctgcattattccccaaaggctatgccatcaggaaagaagagctgattcgtgtttggattggaatggagctgatagatgacgtgccatcattgcaggcacggtataacatgggccattctatattgaataaacttgttgactcttgtttgctggaaacatatgataatgataacataatcaagatcaatgatcttgttaggcatatggctctttccattgccggagatagttacatggtagaagctggaatacctacaaattttgagttccgggaaaatctccgtgttgtttccttggtgaattcttcaataccatcgatcccatcaggtgcttcccttattaagtgtcattgtctctctactttacttctgcaacacaactcccttgagtttatcccagagtcttttttcttgcacatgcgtggccttcgagttttgaatctatctgatacgaacttaattagactgccgagttccattgatgcccttgaagagcttcgagtcttggatcttagtttctgtcaaaacttgaagcaagtgacatcattgtcaaagcttctgaaattacagtttctaaacctctctcagactggaattggtccagctcctcgttctcttgaaaacttaaaaagtctcacagaactcaacctctcatctattcccgaaccacaaaaaattcctagtggtgtgttgccagccttattcagactcaaaagattagcatgctatgttgtagaagctgctattcatgagctgcagaatgtgaattcattagaagttcttgatgccagattcttaaacctttgtgacctgagcagttatgtaaggtctcagcattggtgcatattagagagctatcatctacaggttggttttgaggtgagatctgagcaaccatacaacagaagagtatcactctccagatgttctttgactggtcaagagggagactacgttgtgcttccaagtaacatccaggagttgtatgttgataattgcagagactttcgttgcctatctgatgtcttgcttcctgttgcatatcgtcatagaaactgccagaacggtgcaagtgtagacagttgcaacggagagcaagctgaagtttttgcagggcttgaaatgtgcattatcagtagatgccaggatgttaagacactatttgcaccaagttgggtggaggagaatctccaatcccttgaattattacaagttgaaaattgtagacaagtgaaggagataattgcagaggaagttgtggaatgtggtcattctgaaggaaaggatgctgtcattagcctaccccaacttacgcggctagttctgactctgttgcctcaagtgcatagtgtctataaaggtctgctagtttgttcttcacttctgtggtgtacttttatggactgtccaaaactgaagcgccttccgttctccaacatggatcgtctagaatggattgaaggtcaagaaaaatggtgggacttgttggaatgggatgaaccggaatccaaagcttcgctcagacccttgtttagatgcaagtctgtggatggtgatcgataa

SEQ ID NO: 170 - DNA, 2744 bp, Spinacia oleracea; identical to SEQ ID NO: 169
  source 1..2744: mol_type = genomic DNA

SEQ ID NO: 171 - protein, 826 aa, Spinacia oleracea
MAHQIQIPIKMISIIANLFGIGRYHRGVPCDGGTLDNHQSELSSVLIQPQNKRRKVEEFLWFNTEYVDRIIGWLKDSEIDTIGVYGMGGVGKTTLATQLQTRLLNHVVAWVSVGVDFTVYKLQQDIAGSFGLDLQGDRDAIRRAAMISEFLCRNHNCVLFLDDLWGDFRREDVGIPRKCKLIVISRLLDVCRKLRCKKVVKVEPLQEEESWQLFNRSIGYGVLNSVDVCRIRKLVYDKCVGLPLAITSLATSLRKMVDDDNPSSWREVLENFDLLSAKQPHLEDTFSQLRLSYERLNNKLQRCFLYSALFPKGYAIRKEELIRVWIGMELIDDVPSLQARYNMGHSILNKLVDSCLLETYDNDNIIKINDLVRHMALSIAGDSYMVEAGIPTNFEFRENLRVVSLVNSSIPSIPSGASLIKCHCLSTLLLQHNSLEFIPESFFLHMRGLRVLNLSDTNLIRLPSSIDALEELRVLDLSFCQNLKQVTSLSKLLKLQFLNLSQTGIGPAPRSLENLKSLTELNLSSIPEPQKIPSGVLPALFRLKRLACYVVEAAIHELQNVNSLEVLDARFLNLCDLSSYVRSQHWCILESYHLQVGFEVRSEQPYNRRVSLSRCSLTGQEGDYVVLPSNIQELYVDNCRDFRCLSDVLLPVAYRHRNCQNGASVDSCNGEQAEVFAGLEMCIISRCQDVKTLFAPSWVEENLQSLELLQVENCRQVKEIIAEEVVECGHSEGKDAVISLPQLTRLVLTLLPQVHSVYKGLLVCSSLLWCTFMDCPKLKRLPFSNMDRLEWIEGQEKWWDLLEWDEPESKASLRPLFRCKSVDGDR

SEQ ID NO: 172 - DNA, 2744 bp, Spinacia oleracea
  source 1..2744: mol_type = genomic DNA
atggcgcatcaggttcgaatttttcttcctaattatttgtgcaggctgtagatatcatcttattctttcaaattgcttaatttaatttaattattaaggccatgttcttgagattacaataatttcttatgagttactgttcttaatttctaaatttcttcattgagataattaaaaacagcaaaattaagcaagaatcataacaatacagttactgagtacatattaatactgtaataaataaatagtaattgtttttgtttttgtttccgtagatccagattccaatcaagatgatttcgattattgctaatttgtttgggataggaaggtatcaccgcggtgtaccgtgtgatggaggaactcttgataatcatcaatctgaattgagtagtgttcttatacaacctcaaaataaacgaagaaaagttgaggaatttctttggtttaatactgagtatgttgatagaattattggttggttaaaggatagtgagattgatactattggtgtttatgggatgggtggagttgggaagaccaccctcgcaactcagctccaaactcggctattgaatcatgttgttgcctgggtttctgtgggggtggattttactgtatataagttgcaacaagatattgccgggtcattcgggcttgatcttcaaggggatagggatgcgattagaagagcagctatgattagtgagtttttgtgtcgtaatcataactgtgtactcttccttgatgatttatggggtgatttccgtagagaagatgttggaattcccagaaaatgtaagttgattgtcatttctcggttgctggatgtgtgtcgtaagcttcgttgcaagaaggtagttaaggttgagccacttcaagaggaagagagttggcagttgtttaaccgtagcatagggtatggtgttttgaattctgtagatgtgtgtcgtattaggaagctcgtgtatgataagtgtgtaggtctccctcttgctatcactagtttagcaaccagtttgaggaagatggttgatgatgataatccttctagttggagggaagttctcgagaattttgatcttctatctgcgaaacaacctcacttggaagatacatttagtcagttgaggttgtcatacgaaaggttgaacaacaaactccagcgttgtttcctgtattctgcattattccccaaaggctatgccatcaggaaagaagagctgattcgtgtttggattggaatggagctgatagatgacgtgccatcattgcaggcacggtataacatgggccattctatattgaataaacttgttgactcttgtttgctggaaacatatgataatgataacataatcaagatcaatgatcttgttaggcatatggctctttccattgccggagatagttacatggtagaagctggaatacctacaaattttgagttccgggaaaatctccgtgttgtttccttggtgaattcttcaataccatcgatcccatcaggtgcttcccttattaagtgtcattgtctctctactttacttctgcaacacaactcccttgagtttatcccagagtcttttttcttgcacatgcgtggccttcgagttttgaatctatctgatacgaacttaattagactgccgagttccattgatgcccttgaagagcttcgagtcttggatcttagtttctgtcaaaacttgaagcaagtgacatcattgtcaaagcttctgaaattacagtttctaaacctctctcagactggaattggtccagctcctcgttctcttgaaaacttaaaaagtctcacagaactcaacctctcatctattcccgaaccacaaaaaattcctagtggtgtgttgccagccttattcagactcaaaagattagcatgctatgttgtagaagctgctattcatgagctgcagaatgtgaattcattagaagttcttgatgccagattcttaaacctttgtgacctgagcagttatgtaaggtctcagcattggtgcatattagagagctatcatctacaggttggttttgaggtgagatctgagcaaccatacaacagaagagtatcactctccggatgttctttgactggtcaagagggagactacgttgtgcttccaagtaacatccaggagttgtatgttgataattgcagagactttcgttgcctatctgatgtcttgcttcctgttgcatatcgtcatagaaactgccagaacggtgcaagtgtagacagttgcaacggagagcaagctgaagtttttgcagggcttgaaatgtgcattatcagtagatgccaggatgttaagacactatttgcaccaagttgggtggaggagaatctccaatcccttgaattattacaagttgaaaattgtagacaagtgaaggagataattgcagaggaagttgtggaatgtggtcattctgaaggaaaggatgctgtcattagcctaccccaacttacgcggctagttctgactctgttgcctcaagtgcatagtgtctataaaggtctgctagtttgttcttcacttctgtggtgtacttttatggactgtccaaaactgaagcgccttccgttctccaacatggatcgtctagaatggattgaaggtcaagaaaaatggtgggacttgttggaatgggatgaaccggaatccaaagcttcgctcagacccttgtttagatgcaagtctgtggatggtgatcgataa

SEQ ID NO: 173 - DNA, 2481 bp, Spinacia oleracea
  source 1..2481: mol_type = genomic DNA
atggcgcatcagatccagattccaatcaagatgatttcgattattgctaatttgtttgggataggaaggtatcaccgcggtgtaccgtgtgatggaggaactcttgataatcatcaatctgaattgagtagtgttcttatacaacctcaaaataaacgaagaaaagttgaggaatttctttggtttaatactgagtatgttgatagaattattggttggttaaaggatagtgagattgatactattggtgtttatgggatgggtggagttgggaagaccaccctcgcaactcagctccaaactcggctattgaatcatgttgttgcctgggtttctgtgggggtggattttactgtatataagttgcaacaagatattgccgggtcattcgggcttgatcttcaaggggatagggatgcgattagaagagcagctatgattagtgagtttttgtgtcgtaatcataactgtgtactcttccttgatgatttatggggtgatttccgtagagaagatgttggaattcccagaaaatgtaagttgattgtcatttctcggttgctggatgtgtgtcgtaagcttcgttgcaagaaggtagttaaggttgagccacttcaagaggaagagagttggcagttgtttaaccgtagcatagggtatggtgttttgaattctgtagatgtgtgtcgtattaggaagctcgtgtatgataagtgtgtaggtctccctcttgctatcactagtttagcaaccagtttgaggaagatggttgatgatgataatccttctagttggagggaagttctcgagaattttgatcttctatctgcgaaacaacctcacttggaagatacatttagtcagttgaggttgtcatacgaaaggttgaacaacaaactccagcgttgtttcctgtattctgcattattccccaaaggctatgccatcaggaaagaagagctgattcgtgtttggattggaatggagctgatagatgacgtgccatcattgcaggcacggtataacatgggccattctatattgaataaacttgttgactcttgtttgctggaaacatatgataatgataacataatcaagatcaatgatcttgttaggcatatggctctttccattgccggagatagttacatggtagaagctggaatacctacaaattttgagttccgggaaaatctccgtgttgtttccttggtgaattcttcaataccatcgatcccatcaggtgcttcccttattaagtgtcattgtctctctactttacttctgcaacacaactcccttgagtttatcccagagtcttttttcttgcacatgcgtggccttcgagttttgaatctatctgatacgaacttaattagactgccgagttccattgatgcccttgaagagcttcgagtcttggatcttagtttctgtcaaaacttgaagcaagtgacatcattgtcaaagcttctgaaattacagtttctaaacctctctcagactggaattggtccagctcctcgttctcttgaaaacttaaaaagtctcacagaactcaacctctcatctattcccgaaccacaaaaaattcctagtggtgtgttgccagccttattcagactcaaaagattagcatgctatgttgtagaagctgctattcatgagctgcagaatgtgaattcattagaagttcttgatgccagattcttaaacctttgtgacctgagcagttatgtaaggtctcagcattggtgcatattagagagctatcatctacaggttggttttgaggtgagatctgagcaaccatacaacagaagagtatcactctccggatgttctttgactggtcaagagggagactacgttgtgcttccaagtaacatccaggagttgtatgttgataattgcagagactttcgttgcctatctgatgtcttgcttcctgttgcatatcgtcatagaaactgccagaacggtgcaagtgtagacagttgcaacggagagcaagctgaagtttttgcagggcttgaaatgtgcattatcagtagatgccaggatgttaagacactatttgcaccaagttgggtggaggagaatctccaatcccttgaattattacaagttgaaaattgtagacaagtgaaggagataattgcagaggaagttgtggaatgtggtcattctgaaggaaaggatgctgtcattagcctaccccaacttacgcggctagttctgactctgttgcctcaagtgcatagtgtctataaaggtctgctagtttgttcttcacttctgtggtgtacttttatggactgtccaaaactgaagcgccttccgttctccaacatggatcgtctagaatggattgaaggtcaagaaaaatggtgggacttgttggaatgggatgaaccggaatccaaagcttcgctcagacccttgtttagatgcaagtctgtggatggtgatcgataa

SEQ ID NO: 174 - protein, 826 aa, Spinacia oleracea
MAHQIQIPIKMISIIANLFGIGRYHRGVPCDGGTLDNHQSELSSVLIQPQNKRRKVEEFLWFNTEYVDRIIGWLKDSEIDTIGVYGMGGVGKTTLATQLQTRLLNHVVAWVSVGVDFTVYKLQQDIAGSFGLDLQGDRDAIRRAAMISEFLCRNHNCVLFLDDLWGDFRREDVGIPRKCKLIVISRLLDVCRKLRCKKVVKVEPLQEEESWQLFNRSIGYGVLNSVDVCRIRKLVYDKCVGLPLAITSLATSLRKMVDDDNPSSWREVLENFDLLSAKQPHLEDTFSQLRLSYERLNNKLQRCFLYSALFPKGYAIRKEELIRVWIGMELIDDVPSLQARYNMGHSILNKLVDSCLLETYDNDNIIKINDLVRHMALSIAGDSYMVEAGIPTNFEFRENLRVVSLVNSSIPSIPSGASLIKCHCLSTLLLQHNSLEFIPESFFLHMRGLRVLNLSDTNLIRLPSSIDALEELRVLDLSFCQNLKQVTSLSKLLKLQFLNLSQTGIGPAPRSLENLKSLTELNLSSIPEPQKIPSGVLPALFRLKRLACYVVEAAIHELQNVNSLEVLDARFLNLCDLSSYVRSQHWCILESYHLQVGFEVRSEQPYNRRVSLSGCSLTGQEGDYVVLPSNIQELYVDNCRDFRCLSDVLLPVAYRHRNCQNGASVDSCNGEQAEVFAGLEMCIISRCQDVKTLFAPSWVEENLQSLELLQVENCRQVKEIIAEEVVECGHSEGKDAVISLPQLTRLVLTLLPQVHSVYKGLLVCSSLLWCTFMDCPKLKRLPFSNMDRLEWIEGQEKWWDLLEWDEPESKASLRPLFRCKSVDGDR

SEQ ID NO: 175 - DNA, 3843 bp, Beta vulgaris
  source 1..3843: mol_type = genomic DNA
cattctagtaggtagtaatctcattttgtactcctattccataatttaattcaagcatttcgtggaaaacaacaaaagttcgcagatttatattcagatgaaacttccaagaaatttcccattaacgacgtcttatagaatatgtggttgtttcatgactatattatatgacatcatctgtgaacctcttaattacgccactgtcggtttcttgttgaatacttgaatcctttgacttccagtaaacataaatgaattttatacaatttgaagacgcataaattgagcaactcttctctccaactctctttgatgcagtagcaggtttgtacacttttcttcatctttttaaatctttgttattttacaatgtcaatgtttttcagattacatcttgattttttctaattgaacaacaataacaacaacaacaacaacaacaaattgaatcagttttttcagaataatgatatgaacaattagttatgtttttgtttctgtagatgatgaatgccatatttactaaatttttccggatagaattgttctggcgtgatttacgatgtgatggaggaagaattgatacaagggttgaaactgttgttaataatcaatctgaactgggaactggtcatatacaacaagaaaataaacgcaggagattagtacaaccatctttgtgttttaattcagagtgtgtagataggataattagctggttagataatgatgaagttgatactattggtgtttatgggatgtgtggtgttggaaagaccactctggcaacgcagctcgaaactcggcttctaaaccatgatatccgttttagtgctagtcatgatgttgctggggtttctgtgggggtgaattgcagtgtatataaattgcagcaggatatcgcgggtgcttttgggattgatcttcaaggcgatgaggataagactagaagagcctctatgatagaggcgtttttttctcgtcgtgataagtgtgtactcattcttgatgatttgtggggtgattttcgtcgaaaagatgtaggcattcctaaggagtgcaagctagttttgatttctcagtcgttggatgtttgtcgtgtccttggttgtgaaaaggtgctcaaggttgagcctctttcggaaggaaagacttggaagttgtttaaccatagcatagggggtggtgttttgaataatgaagatgtgtgtcgtattaggaagcttgtgtatgataagtgtgctggtctccctcttgctatcgttgaattagccaagagattgagaaagatggttgatgataatggttttagttggagggaagtccttgagggtacgaatcccttttcttcgagatcaatgcacttggaagatacattcagtcacttgaagttgtcttatgaaaggctgagcgacatcaaactccagcagtgtttcttgtattctgcgatataccccaaaggccatgctattagtagagaagagctaattcgtgtttggattggagagaagttgatagatgatatatcatcattgctagcacagtatgacaagggccactcaatattgaataagcttatcaactcttgtttattggaagcatgtgaagattataaaggctgtataaagatccatgaagttgtgaggcatatggctctctcaatagctggagatagttttatgatagaagctggcgtaccttcaaaatttgagttccgggaaaatgttcgtgtagtttccttgatcaattctttaatttcaccgatcccatcaggtgcttcctcaaagtatcatactctttctaccttacttttgcaacacaacccccttgaactgattccagaatcattattcttgcaaatgcgtgcccttagagttctgaatctgtctgatactcgcctcattagacttcctagttccattggtgccttggaggagcttcgagtcttagatcttagcttttgtcagaacttgaagcaagtggcagccttatcaaagcttctcaagttacagtttctaaatctctctcagacgacaatcgaaaaagttccttgctctcttgaaaagttaaaaagactcacagagctcaacctatcctctattcctgaaccaacaaaaatccctagtgtagtattgcttgccctatgtagactcaagaaattaacatgccatgttataggcactattcatgagctgcagagaatgaactcgctagaaattcttgatgccaggttttttagcctctgtgacttgagtgcttatgtaaggtctcagcattggtgcatactagagagctacagtttacagcttggttgtgaggtgcaagctgagcaaccgtacatcagaagagtatcactgcagggtttttccttgactggtcaagaacagtacattgtgcttccaagtaacatccaggaattatatgtcgataattgcagaggcttccgtaggctatctgatgtcatgtatcctgttgcatatcaacataaaagttgccagaactatgaagttttttcaagcctcgaaatatgtgtgatcagtaggtgccctgacgttgagacattgtttgcagcgaattgggtagagaatctccaatcccttgagttattgcaagttgaagattgtggacaactgaaggaagtaataacagaagaatttgtagaacggggtgtctatcctgaaggaatttctgctcctatcaatctcctccagattaggcagctaattttcactcggttgcctcagatggaaagcatctataagggtcaattagtttgtgcttcgcttctgtcatgtacatttctggactgtccgaaactgacgcgccttcccttctcctgcatgggtaatggagaagaaacatttccctggcgtctggaatggattgaaggagaaaagaagtggtgggagatgttagaatgggaccaaccgggatctgaggctttgttcaaacctctgtttagatgcaagtctttggatgatcaatgacttggccatctttttgtgttggagcttgctagctgagacataattccatcaaatggtttggaacacttctcttttcctttcctcccccactccttttgcttgtttgaaaataaacttttagctggctctaagtttcaacaggggcggtaaaagatttaaaaatggaaaaaaaaaagaaacccattgttttcggggaagtgctagcctctaataagatagatccccaatatttcacatgttggaatctatcgtacatcattacacccaaaaaaggaagcaaatattttcagttgttactcaaaaccctttcaattattgtagtcgaattcataaaaaattaaaagtttcacagtatgatcggaagagtttttgaggactgacatgtcttatagatcccatgttaatctataaggagaggtttataaacccttcgttgttccctccaatggaaaaattgagccttttataagataaataactcaagaagcctttgtgattgaggctttgagatatacagtaagttatttggaggtaaacaagaatccaaagtgaaccaaaagtattgctgcatttgtttacgtatatctgggtgtaccagtaccacctatgttgtggatgtagatactaaacacctactaataatacagtagtttgcgagtgtttttcttttctatattattacttaaaagttgggttgaactcctttttaaaatattctatgtaatttttcatgtaatgtgtaattttcgtttgagcattcttctgcctttaaataaactccttaaaatgaagttgtacctttgatttatgtttttatatatgaataagaccattatgatatgatcaataggcttta

SEQ ID NO: 176 - DNA, 4869 bp, Brassica napus
  source 1..4869: mol_type = genomic DNA
  misc_feature 3505..3562: note = n is a, c, g, or t
ccccacaaaattgtacagtgttattttcatccgttgccaatcgaaatcagctccagaagttctggattttcaatcagaatcgtcaagtttatggtttaaggttcaaaatttgaagtgtctagtaaaaaatctatgatctttccgcaattgcgaaaccgcttcagcatatttcattgccgccatagttttcatgtcgagcttgtcacgttccttgttttgttttgaggttagttaagaggcaaatattagcatctagagacttatctgttactgaggattttagttgggtaaaggtagcttgtgagagttagggactctctaatataatccattggttataagttttcagctcaagcatgtcatgttccttggtctgttttgatgttaggtagaggcaatacttatctattattggatatttggggactatctaacataatttgtcggttctaagcttgaatattggctctttgcagatttataggagagcgaaatcagtttctaagacaaatcccttgttgatatttgcctctaacaactcttagaatgcgtgcacgctcacctgtaagtagttcatttcttgtcttttcttagtaagtgggattggtgtcaaagatgacatttgaaagaagacaatttgaataagtcggaatcacgtttaaggcatagagttaaccaaataatagtttcgattatttctgaaaaagtaacaaccaaattagaaagtgtcgatgaatctacccgaagtcttactagaagttttaaaataaaacgggggagaagtcttcaagtaaagttgttggaaacttgaaatgtcaactctttgatgaccaaatcaaggcatcaacatcaaagtctagttatttatttgtgaagaccatataaagtcagcataaaattttgtgaccctttctcttctaaggagactcttaagaagtcgttggtgcctcatagtggtttatcttgcggatatttgatcagtcgttcctcacattgttcattatcattccttcttttcatttgtgcctccctctctgtgaaactctttgtcatggattgtctgggctcttttttgggttctttcttggcagaggcagggcgtggtatatgcagatcaacctatactcgagccatttataccatccggttcaagtcaaacatcaaagctttaaataatgcgctcagtggccttattgatgttcagaccaaagtggaaaaagatctcaaaaccttggagaccaaagggaagtccttgcacgggccactcagaacgtggttaagagacgtgaaagagattgtctctgaagcaaattcaattctggaagggcgtgtttcatgtgctctgtctttgagatgtaagcggagtaaaaaacttgtggttgttcttgataaagtcaagaagcttcataagctaggcgtagagcttctcgacatattttctttggaaggaagatctgtactagttgagagaatccttggaccctcgatcgctgatcaaacagtagcatcaaagatgttagtcaaagttcgaagctgtttgatgagggatggagttcaaaagatcggtatttggggtatgggtggagttgggaaaacaacacttgtaagggaactgaacaataagctgtggaaagaagctgatacgcagccttttggtatggtgatatgggttacagtttccaaagagtttgaattgggtagggtccagaggcaaatcgctgagagattggatgtggaaatcagattaggcgaaagcgaggaaagactggctagccggatatatggaaggcttgagcaagtaagtagctttcttctcattcttgatgatgtctggaaacccattgatttagaccagttggggattccacacacaaatgaacacaagtctacaaagattgtcttgacttctagatttctagaggtgtgccagagcatcaaaacagatattgacttcagagtgaattacttatgtgaagaagaagcttgggaattgttctgtaaaaatgctggagaagtaactagattagatcgtgttagacccatagcaaaaaaagtttctcgggagtgtggtggattgcctttggctatcatcacggttggaatggctatgcgggggaagaagaaggtggagctgtggaaacatgcccttaaagaactcaagagtgcggtgccttatgtcaagagtattgaagaaaagatctaccagcctctgaagttgagctacgacaggctccagccaaagatgaaatcttgcttcctcttctgtgccttatttccagaggattactcaatcgaagtatctgagcttgtgaggtactggattgccgaagggttcattgatgaaacacaaaactatagctacttaatgaatcaaggaatcaccttggtggagaatctgaaagactcttgcttacttgaagagggtgctcacggtgacacagttaagatgcatgatgtggttcgcgattttgccatatgggtcatgtcttcctcacgagatgatagtcactctcttgtcatgtccggtataggcttgtgtgagtttccgcatgagaagttcgttccttcaatccgaagagtttctttgatgaacaataagcttactaggctctcaaatcagctcccaaatcaagtggtaaagtgtgttgaactctcagctttgctgctacaaggaaactttcacttgaaggaattgcctgaggggttcttgatatcttttccagcacttcgaattttgaatctaagtgggacatgcataaggtcgttgcccaactccctcaacaagcttcatgagctaagatctctcatcttgagagactgctactaccttgaagaagttccttcccttttaggccttgcaaaaattcaaattctggatctttgtgccactcgaataagggaaactccaagagggttggaaactttgaacagcttgagactacttgacctctcccgaacgcatcacctcgaaagcattccagcagaaatcatcccgaagttatcaaatttagaggttctagacatgacccttagtcatttccactggggcgtccaaggacaaactcaagaggggcaagcaacacttgaagagattgcgcgcctccaacgtttgtcggtcctctcaatcagagtcgtatgtgttccacctctctcccctgattacaattcctggatagaaaggttaaagaaattccagttgtttatcggtccaacagcaaactctttaccttctagacatgacaagcggagagtgactattagtagtctcaatgtttcagaagcattcattggatggttgctagagaatacaacttctctagtgatgaaccattgctggggtctcaatgagatgctggagaacttggtaatcgatagcacgagtagcttcaacatgttaagatctctaacggtagagggttttggtggaagtataagacccgctggtggatgtgtcgcacagctggatcttctacctaaccttgaagagcttcatctgcgtcgtgtnnnnnnnnnnnnnnnnnnnnnnnnnnnnnnnnnnnnnnnnnnnnnnnnnnnnnnnnnntcgtgtaaatctgggaaccattagagagctcgttggtcacctggggttgagatttgagacactgaaacatctagaaatcagcagatgtagccagctcaaatgccttctttcatttgggaacttcatctgtttcctgccgaacctacaagagatacatgttagtttctgtgaaaggcttcaggagctgtttgactattttccaggagaagttccaacctctgcttctgtggtacctgctctgcgtgtcataaagctaagaaatcttccgcggttgaggagattatgtagccaagaagagtcatggggatgtctggaacatgtggaagtgataagttgcaatcttctgaggaatctacccataagtgcaaatgacgctcatggagtcaaagaagtaagaggagaaacacactggtggaacaacttaacttgggatgataacactacaagagaaactcttcagcctcgtttcatagcagctgggaatatacctactggctctcttggaatgtcttgctatcagagctccaacacaattgaagaagcttctccaatttctactttaccagaatctcaggccgaagagcttcctgtagctacgatgtaatcatgaacttacagaggtgtggataatacttggctcacttgcaatatcttgtcaccggggctccagctcaatctaatagagagataagaggtttctccagtttagatagaagaccgaacgtctgaggagcttatgaatggacactgtaatcctcgagttgcagaaagtttcaggttcaacagttgaccctcgctttgtcaaaaagttttcaggtttgagcagtgaaccatgttagccactgtagtttaacctgctcgcatttgctaggaggcctcaaaagtgtctggtcttcacaaaggagaatatttaagatgtagtagtccgttttcttacactttcataaatttcctttgtcaaaaagatgcagaagattatggtaaacgtgggtttgctgctctggtcgacaatactttgcagaaaatcaagagccacgagaagtctcaaaggcttgagtcaagagctttcttgtgccagggacagggacaggtcagtattaagtattacggtccagttggtggacttaaaaatatgtgtttcataatcagtgatcgttacactaaacagtaacaggtttgaagttgttatacctcaggaattctcggatatttttattctccttttgtgtatttggtttcttgatttattcagttccgtgcaatgaaagtaaagatgaaatttcgttttctatacaagttctatgaaa

SEQ ID NO: 177 - DNA, 4221 bp, Brassica oleracea
  source 1..4221: mol_type = genomic DNA
catttcttgtctttttcttagtaagtgggattggtgtcaaagatgacatttgaaagaagacaatttgaataggtcggaatcacgtttaaggcatagagttaaccaaataatagtttcgattatttctgaaaaagtaacaaccaaattagaaagtgtcgatgaatctacccgaagtcttactagaagttttaaaataaaacgggggggagaagtcttcaagtaaagttgttggaaatttcagatgccaacttcatagatgactaaatcaaaggcataaacatcaaagtcttgttaattatttatgaagactttataaagtcagcatttctgaccctttctattctaaggagaccattaagaagtcgttgctgctcatagtggtttatcttgtggatatttgatcagttgttcttcacatttcttgttatcattccttcttacttttctttaatctcgttgtgaaactctttgacatggattgtctaggctcagccttgggttctttcttggcagaggcagggcgtggtatatgcagatcaacctatactcgagccacttataccatccggttcaagtcgaacatcaacgctctaaagaatgtggtcaatggccttgttgaagttcagaacaaagtggagaaagacctcaaaacgttggaaatcaaagggaagtccttgcatgtgcaactgaggagatggctaagagatgtggaagagattgtctctgaggcaaattcaattcaggaagggcgtgtttcatgtgctctgtccttgagatgtaagcggggtaaaaaacttgtggtagttcttgataaagtcaacaagcttcagaagctaggcgtagagcttctcgacatattttctttggaaggaagatctgtactagttgagagaatcattggaccctcgatcgctgatcaaacagtagcatcaaagatgttagtcaaagttcgaagctgtttgatgagggatggagttcaaaagatcggtatttggggtatgggtggagttgggaaaacaacacttgtaagggaactgaacaataagctgtggaaagaagctgatacgcagccttttggtatggtgatatgggttacagtctccaaagagtttgaattgggaagggtacagaagcaaatcgctgagagattggatgtggaaatcagattaggcgaaagcgaggaaagactggctagccggatatatggaaggcttgagcaagtaagtagctttcttctcattcttgatgatgtctggaaacccattgatttagaccagttggggattcctgaacacaagtctacaaagattgtcttgacttctagatttctagaggtgtgccagagcatcaaaacagatattgacttcagagtgaattacttatgtgaagaagaagcttgggaattgttctgtaaaaatgctggagaagtaactagattagatcgtgttagacccatagcaaaaaatgtttctcgggagtgtggtggattgcctttggctatcatcacggttggaatagctatgcgggggaagaagaaggtggagctgtggaaacatgcccttaaagaactcaagagtgcggtgccttatgtcaagagtattgaagaaaagatctaccagcctctgaagttgagctacgacaggctccagccaaagatgaaatcttgcttcctcttctgtgccttatttccagaggattactcaatcgaagtatctgagcttgtgaggtactggattgccgaagggttcattgatgaaacacaaaactatagctacttaatgaatcaaggaatcaccttggtggagaatctgaaagactcttgcttacttgaagagggtgctcatgttgacacagttaagatgcatgatgtggttcgcgattttgccatatgggtcatgtcttcctcgcaagatgatagtcactctcttgtcatgtccggtataggtttgtgcgagtttccacatgagaagttcgttccttcaatccgaagagtttctttgatgaacaataagcttaaaaggctctcaaatcaagtggtaaagtgtgttgaactctcagctttgctgctacaaggaaactttcacttgaaggaattgcctgaggggttcttgatatcttttccagcacttcgaattttgaatctaagtgggacatgcataaggtcgttgcccaactccctcaacaagcttcatgagctaagatctctcatcttgagagactgctactaccttgaagaagttccttcccttctagggcttgcaaaaattcaaattctggatctttgtgccactcgaataagggaaactccaagagggttggaaactttgaacagcttgagactacttgacctctcccgaacgcatcacctcgaaagcattccagcaggaatcatcccacagttatcgaatttagaggttctagatatgacccttagtcatttccactggggcgtccaaggacaaactcaagaggggcaagcaacacttgaagagattgcgcgcctccaacgtttgtcggtcctctcaatcagagtcgtatgtgttccacctctctcccctgattacaattcctggatagaaaggttaaagaaattccagttgtttatcggtccaacagcaaactctttaccttctagacatgacaagcggagagtgactattagtagtctcaatgtttcagaagcattcattggatggttgctagagaatacaacttctctagtgatgaaccattgctggggtctcaatgagatgctggagaacttggtaatcgatagcacgagtagcttcaacatgttaagatctctaacggtagagggttttggtggaagtataagacccgctggtggatgtgtcgcacagctggatcttctacctaaccttgaagagcttcatctgcgtcgtgtaaatctgggaaccattagagagctcgttggtcacctggggttgagatttgagacactgaaacatctagaaatcagcagatgtagccagctcaaatgccttctttcatttgggaacttcatctgtttcctgccgaacctacaagagatacatgttagtttctgtgaaaggcttcaggagctgtttgactattttccaggagaagttccaacctctgcttctgtggtacctgctctgcgtgtcataaaactaaggaatcttccgcggttgaggagattatgtagccaagaagagtcatggggatgtctggaacatgtggaagtgataagttgcaatcttctgaggaatctacccataagtgcaaatgacgctcatggagtcaaagaagtaagaggagaaacacactggtggaacaacttaacttgggatgataacactacaagagaaactcttcagcctcgtttcatagcagctgggaatatacctactggctctcttggaatgtcttgctatcagagctccaacacaattgaagaagcttctccaatttctactttacaagaatctcaggccgaagagcttcctgtagctacgatgtaatcatgaacttacagaggtgtggataatacttggctcacttgcaatatcttgtcaccggggctccagctcaatctaatagagagataagaggtttctccagtttagatagaagaccgaacgtctgaggagcttatgaagggacactgtaatcctcgagttgcagaaagtttcaggttcaacaggtgaccctcactttgtcaaaaagttttcaggtttgagcagtgaaccatgttagccactctagtttaacctgctcgcatttgctaggaggcctcaaaagtgtctggtcttcacaaaggagaatatttaagatgtccgttttcttacactttcataaatttcctttgtcaaacgtgggtttgctgctctggtcgacatactttgcagaaaatcaagagccacgagaagtctcaaaaggcttgagtcaagagctttcttgtgccagggacagggacaggtcagtattaagtcttacggtccagttggtggacttaaaaatatgtgtttcataatcagtgatcgttacactaaacagtaacaggtttgaagttgttatacctcaggaattctcggataattttattctccttttgtgtatttggtttcttgatttattcagttccgtgcaatgaaagtaaacatgaaatttcgttttctatacatgaaagtatgtttgttactggaaacgttaaaagaatgttcaaattttgcaaataaa

SEQ ID NO: 178 - DNA, 4375 bp, Capsicum annuum
  source 1..4375: mol_type = genomic DNA
ttactgctttgctgagcagctgtaaaaggtaaattacttttacttaaacttgtattacttctagtttattatctgattgaaattcctcttactcattgtttcttaggttataaaaattatctactttccagaaagaaaaaaggttttacttttataacatttcggtatgaatacccattaagctatcttttctagaagtcagaacccgtaaactaaaagttctagcttcaccactgcaccaaagggtgttgaggatctttgatcaaaggtcttgggttcaagttcctaggaataaagaaatggaatggaacatttatattggcccatggtgcgaatattggattgtcggtctagtgagttccaaatagcaaatggttattaaaaaacgttaattctagtactttataattctctcaattcttttaggatgaaggaaatactgaaaaaattgcttcttaatgaatgggtgtaacagcaaagagtggttataagtttttctatagacgttagaaccagtatgcaatttctttgtaattcttttttatttgtaatcagataagagatgctgcttccgtaaaaaaaaattactatctatttaaattccatcgtaaaatgcactgtaattttgttcctatcctggtatgatttgccaaactttaacataaaaggtaaaattgttgccttattaatggctagccagtctggtattactttgttccatataaaatttgattgaaaagtttagttttattgagaaaatatcagattaagatttgaattttagttacacgcaaaatatgtgatgtcttgggctccttgatgccatgcatatgatgtttctttaagatgaatattttcattcataaaatattttgattatatcacaaatggaagtgtgttgtgaaggaagtattgttgtttagtaaacgacatattcattataatttcttccactgcaattgaaatgctctgcgtggttcttttgtttcagtgctttttggaagatcatggatacttttattgagaaggtagttgattttggggtgaagaaattcaaaagtattagtgacttcgatgagaatttggaaactctggaaagatatgtaaagcaattattagataaagcactcgatgtgaagacagaggttgataatcgagagaaatctggtaggaggaagaggaaaagagaagttgaatcttggtttcacgaggttacaaagattgaagaagaattacgtgcattaaaagaagtagtaacaagagggaagaaaaatggaggtgttttggagaagatgaatggaagggtaggagaacttctcgagcaaagtaaacattttggaacgctcgtacatgatatgtatgagcctgaggagtgtccactgctggcatcacaatttaatgacaaaatatcaaaacaaaatttagaagtgatttggacgtggttacaggatgagaatgtctcaagcatcggtatatatggtatgggaggtgtgggcaaaaccactttggtaaagcatatacataatcgtcttgttaaggagattcattatcaagtctgctgggttactgtttctcaagggtttaccatcaaaggattacaatatgaacttgccaaaattttgaaactggacctttcagatgaggtagacgaacatagaagggcagccaagttaaattgggcattcaaaaataggaagaaaattgttatcatattggatgatgtgtgggatcgcctttgcttggagaagttgggttactctcttggcatggaaggctgtagactgattctaactagtcgctcatctgaagtctgcctaaagataggttgtcagaaactacgggaagtgaagaatctcaattctgatgatgcttgggagttgttcaggaagagtctaggatgcgagactctggttagtccagatatcgagccaattgccaagtccttggcgggaaggtgcaaaggcttgccactcgggctcatcactttggggggaagcatgagaggggtgactgatataagggagtggaagaatgcattgaaagaattccctgatgacatggaaagcgatgtcttcaaggtacttcagtatagttatgatcggttgagagatacaaatatgcaagagtgcttcttgtactgtgctttgtatcctgaggactgtgaaattggtagagatgaattaattggtagatatatgatggagggaatgatgaagggagatagcagggaagaagagtttaaccatggccataccatattgaataaactagtgaagatttgcttacttgaagcaacttccgaaggagtaaggatgcatgatttactcagggaaatggcattgcggatcacaaatgttaaaccaaggtacatggtaagggctggaataggatcacaagttccggaggagcaagattggatattcgatttggataaagtgtcttttcttaaaagctacataaggggaatccctgaagacatggctcccaattgcccctcattatcaagcttgcttttctctgattgtactttgagatggatcccagaatccttctttcagcatatgaacaacctccaagtactcgacttgagctataactcagtgcttatggatttgccgagttgcttttctaacttgagaagtcttagggcactctcacttcgacaatgtgatcagctcagatatgtgccaccactgggaaagctcaaaaatctgagggtgttagatgtatctcacactggtattaaggaagtacctcaaggcatggaaaacttattcaagcttaaatttctagatatgagtggaataggtcttgatgaactgccaaaggagatattacgtaaactttcccatcttcaatacctcaaacttccactacgtgtgaatgcaaaaattgaagacttgtccagcttggaacttctagaagaattcaaaggccgcttctgtgatttgcataacttcaacaagttcatgagaaatcgccgtaactgtgagaaagattggtggtatgacataagagtaatgccaaaggtgtccagcgctcaatgtttcttgcaccatgactctggaaatcgtagagtcgaacaaagaaaagtgattctacagagtttcagccttgaagcagatggaggagttccggcatcaattattcttccacattgcgttcaaaatctacatattgaaaactgtcgtggtctgcgtagctgcttggtggacagttttcagttacaggctactttaagaggcttgagctgtgtgatcaagcattgtgatgacatagaatggattgtcaatgtgcctgatgggagaaatactattacaaagacagactgcatatgtttccatagtctgactgttcgttatttgcgaaatcttgttggggtttgtaaggggaaaattgcatctcacaccttctcgggtctgacagaattgtgtttcagccactgcaataggatgaagaagttgtttccatgggctatcgtgcaggatctcaaaaaccttcaggtgctttgggtacagtattgtgatgagatagaagagataataggaagagaggaagagggaagtagccaaagcagcaatccccagattacgtctacaactgctgatcttccgaagttaaaacggctccacctaagtgtcctgcctgagttgaagagaatctgtgatggaaaattgatctgtgattcccttgaatcaatggattttaaatggtgtcccaatctgaagaggctgcctttctttactcccaatacaaatgggcatcctctcccttccctcaaaagaatcgaagttaaaaaaagttggtgggaaagattggagtgggatcaatcccatatcaagaccctcttacaaccttatctaattgcagatgatgatgaaaaattggaggggaaccaataccatgtcaagaaccactttcgaccttattaaattgcagatgatggtggtggtggtgttgttgatgttgacaacgatgatggtgatgttgctgctgctgctgatgatgatgatgatcgaggctcactggcgcagcaatgagctgtctttctgatgtgcaggatttacatgagttaggggagttttgggggtgtctaagctctctggaaaaaaacaaagtaaatgcaggacaccttatgtttcccccttctctcctcttttcagcacgtcgatggcgtatctgagctcactttgttctccttccttatatgaactccattattgaaatttgaagccttgtaactaccatgagaagaagaattgatgaacatgatgatgagttcccaacaattaattaataagctattgatctttgactcactatctaacatatataagtttttcaagcctagcaacgtttttcagcagcaagctac

SEQ ID NO: 179 - DNA, 4132 bp, Chenopodium quinoa
  source 1..4132: mol_type = genomic DNA
tttttttttttttcttttgaaacacttttactaatcaaagctgtgcgattattaaaacttggagggttgaagcctaaaaagtcaagttcgaagaagctacaagtgcaagctaaatataggaccagcctaacttttgcttccatttttttccatcatctttcatgcatctgcaggtttgcacttaccttttctctaaataatatccttatcgtttttaatttatgtttttaggctgtaaaaatcgtttatcttagtagatgtacaattcttattgaggatttgttctttaaaattaccgtattttttttttttttcattttttagattataatatttgttgttgttttcattgaatagatcatatgacaaattatttatgagagaatagcttgaattgtattgatgatcttggctattatttatagcctacaaaagataacttatcctaaatataatattatgaaatctatatggaaaatatatcagaataatatattttcctatattcctaacatcatatgtaattttatttgttttttaagtttataagctaaaatcccaacgctgatagtaaagataataattgtttttttttttttttggttggtagatccaaaatcccttgaaaatgatttcgatgatttataagatgtttgggataggaaggcattatcgtggcgtaccatgtgatggaggtacaaacaatagtggagttgaaaatcaatctgaattgaggagtagtgttatggatgaatttcaatctgaatcgaggagtagtgtttatttacaacagcccgaaataaagcgcagaaaagttgaggtatcgttgagcttaaacacaaagtatgtgaacagaatcattgattggctaaaggatgataaaattgttagtattggtgtttatgggatggccggggttgggaagactaccctggcaaagcagctcgaatttcggcttcgttatgagacgccttttactgatgtttatgctgttggtatggtttctgtgggggtggattttaatgtatatcagttgcagcaaaaaattgctggtgcttttaggcttgatcttggaggtgatcgggatgagactaggagagcggccaagattcattcgtttttgtctcgaaatgataagtgtgtactcatccttgatgatttgtgggatgagtttcgctatgaagatgttgggattcctaggaaatgcaagctgattgctatttctcggtcacgggatgtctgtcgtatgctccactgccggaaatttgttctggttgagccactttcggaggaagagagttgggagctgtttcaccaaagcataggtggtgaatatttggattccaaacaagagtcccattttaggaagcttgtgtgtgataagtgttcaggtcttcctcttgctatcactgggttggccagatgcttcaggaagatggttgatgataatctttctagttggagggaagtccttgaaggtgcaaagtttccttttacgagacaagattacttggaagatgcatttagtcggctgaaattttcttacgaaaagttgaacaatatcacgctccagcgttgtttcttgtattctgccttgtaccccaaaggttttgacatacgcagagaagagctgattcgcctttggatgggtgagaagctgatagataatgtttcatcgttacaagcgcgatatgacatgggccattccatattgaataaacttctcaactcttgcttgctggaagcatcagaggataaaaggactatcaagatccatgatcttgtgaggcatatggctctttctgttgctggagatagttttttggtagaagctggcaagacttcaaaattggagttccggaagaatctccttgctgtttccttaattaattcttcaatatcgccgatcctcccagatggttctcaaaactatagctatctctccaccttacttttgcaacacagctcctttgagttgattcccgaatcttttttcttgcaaatgcgtgcccttcgggttctgaatttgtctgctactcgcttacttaaattgcccagttctattggtgccttggaagagcttcaattcttagatcttagtctatgtcagaacctgaagcaagtgccacaagtatctaaccttctgaagttgcagtttctagacctttcccagacagcaatcaagcaagttcctcgctttcttgaaaagttagaaggactcacagagctcaacttgtcctctattttggaaccaaaggaaattccttgtggggtgttgcctgccttattcagactcaagaggttagcatgccagattgcaggcgctatttctgagctgcagaatgtgaagtcattagaaattctcgatgccagatttttgagcctgtgtgacttgagcaactatgtaaggtctcagcactcgtgtcaattggacagatatcatctaaaggttggaggtgaggtgggatctgatcaaccatacagcagaaaagtatcattgcacggctgttctttgactgatcaagaggaagattacatcgtgcttcctaataacattcaggagttgtatgtcgacaattgtagagacttcccttgcctatctgatgtgttgtatcctgttgcatatcctcctagaactcatgatgatgcaattataggaagttgcaacgaagagcttagttgtttaaaccagcaagctaaacatttttcaagccttgaagtatgcatcattagtagatgccaggacattaagacattgtttacactaagctggatggagagtctccaatcccttcgattattacaagttgaagattgtagacaagtgaaggagttaatagcagtcgaagtagtggattgtggtccaactgaaggagaacatgctgtcatttgtcttccccaacttaggcagcttgttctcattctattgcctcagatggaaagcatctataagggtcgacttgtttgtgctttgcttctgtcttgtactgttatggactgtccaaaactgaagcgtcttccattctccaggatagatgcaggagaagagtcattcgtcccttgtctagaacggattgaaggccaagagaaatggtgggacttgttagtatgggatcagccggaatctaaatctttgctcaaacccctgtttagatgcaggtctttggatgacaagattgtttactactgacttagcctccttgctgtgttaaatggtttgtttgcttctttctctctctctctctcttcctctcccccgccccccaccccccaccccctcttttatttccatataaataagaaactgagaacaggttgaagcccttgttcacaaagagcaggctggcttcccaactgccgagcccttcgtagaatcagtttatgtagaccatctaaagttattccccctcccataaggcaaagatggccaaaattatcgtattttggagagttttacttccaaaagcactccttattcagttaaggagtattccctggcctactaccactgggtgattaatcttatgattttattaccgcactatataatcctagactcttcagtcttcaaaggttatgataataaagttttctagttgtttgttgaaaagactgttattttcaaaagagattaaaaagacctttcatgatgtattatatgcttaagactttggcatttagcctaattcactatgtaatttaatataacgtctgtcatttaatattttgattagttgaacaatgttgtggcttttcataaactactactcgtactacttaattaaaagagtgttgaattagattcaaagttcctctagtgtgctactaatttttttttttttattggtaaggagaagggcttccttggttgtaacctctcataggtccaccagaccaccagtgtgcgaattggagtatatgtattttttttttctttttttcgaggaaatgtatttaagctcatcagtaaacaactgtgtggaatactaggctgtttgtgtttcgatatctatgttattatttagaacttagaagaagtatcaatgaaagagtttagtaatttctaagttttttaatcagctttttttctaaaaaatttgaattgaatgagcttcatataaaagacaattca

SEQ ID NO: 180 - DNA, 7191 bp, Citrullus lanatus
  source 1..7191: mol_type = genomic DNA
tggagatttgtgcgggcgccatcgtgggtccaatcggagaaaaaatcaccaactgcacggtggatccagttttccggcaactagattatctgcttcactttagaagcaatgtgaatgatctcagagatcaagggaagaagctggtggaaaccagagattttgttcaacactccgtcgactccgccaaaagcaatggagacgaaatcgaagttatggttaccgaatggttgagcatttctggtcaatttagtgaagatgtcgaaagatttttcaacgaagcaaacggccgaagtcttcgatggtggaatatgctatcacgacatcgatttagtagaagagctacgaaactagctatggaggttgttaaggccattgaaggagggagtttcgagagagttgggtttcgtaaacctccacagcaaattatgacgctaaacaacagtaagaagttcgaagcctttgaatctagggtttcgattctaaaggagataatcgaagcgcttggtgatgctaatgcgagcgtgattgtagtacatgggatggggggagtagggaaaaccaccctagttgaagaaatggcaagattagccatggagggaaagctttttgatgctatagcaatggtgactgtaaaacagattccaaacattaagagaatacagggggagattgctgatcagttagggttgaaatttgaggaggaaaaagaaagagtgagggccgatcgactgcgtcgaaggttagagatggagaagaaggttttagtgattttggatgatgtctggactaagcttgatctggaagaggttggaatttctagccatcataagggatgtaagatacttgtaacttctagaaaggatgatgtatttttcgatgattttggtactcagagaaatatcaagatcaatattctgtcaaaaaaggaatcaaggaattttttcaacaagatggcatgtgattctgttgaatcttctaatgatactgatcctgaaatggaagctcttgctactgaattagcagatgagtgcggaggattgccactttctcttgcaactgttggacaagccttgaaaggtaaagggcggccaagttggaatgatgccttgcaagaaatgaagtttcctgaccaacccaataactacggggtgaacaaagcggcatatttgtctctgaaactgagttataaatctctaaacagagacgaagcaaggtcattattcttactatgtagcttgtttccagaagattatcaaattaacatcaaatacttgttgatgtatgccatgggtttggggttattaaacagcatgagttctctagcggtggctagatggagaatactttctttggttgatgagctcaagacttctcacttgttgcttgatggggctgatagcgatttcgtgaaaatgcatgatatagttcgagatacagcaattttgattgcgtcaaaaacgaagtccaagtatttggttagacatggtagtggagagagtttgtggcccccaatggacgagttcaaagattacactgcaatctcattaggatgcagtgatcactctgaactcccagaatttatatgtccacagcttaggttcctattattagtgggaaaaagaacatctttgcgattacctgaaaatttttttgcaggtatgcaggaactaagagttctagacctgactggcttatgcattcagcggcttccgtcatcaatcgaccaactggtaaaccttcaaacattatgtctagatgactgtgttttgccggacatgtctctagttggtgaattgaaaaagcttgaaattcttagcttgagagcatctgatattattgcactcccgagagtaattggggaacttaccaatttgaaaatgttgaacttgtctgattgttcaaagcttaaggtgatccctgctaacctgttatccaggttgacagggttgtctgagctatacatggacaatagttttaaacattggaatgtaggagagatggagggaagtattaatgcaaggatttctgaattagacaacctgcaacggttgaccacattacacgtgcacattccaaatcccaccattctaccaaatgcctctcttttcaggaaattgagtggttacagaatactaattggagatggttgggattggtctgggaagtatgcaacttcaaagactctgaaactcaagcttgatagaagcattcagagagaggatgcaattcaagcactactagagaatactgaagatctgtatctagatgaattagaaagtgtgaagaatattctattcagtctagaccacaaaggctttcccaaattgaagagtttgcgtgtcaataacaatgttgagattgtgagtgttgtcaactcagataatatgcagcatccacacagtgccttcccattgttggagtccttatttctgaaaaatctagctgaacttggaagcatttgtcgtggaaggcttccacaaatgtctttccgtaacttgaaaagagtaaaagttgaaagctgtaacagattaaaatttgtttttccatctttcatgggcagaggccttatacatcttcaaaagctggagattagtgaatgtggtgtcatggaaacaatagtttccaagagcaatgaaacagaaatgcaaatcaatggtgataagtgggatgagaagaacatgattgagtttcctgaattgcgttctctgatactccaacatctaccagcgcttatgggtttctatagtcatgattgcatatcagtaccttcaactaaaatggattcacatcaaacaatttctactattgagcctagttatcgtccacttctcaaccaacaggtatgctatctttaattgtacttcttcacttattttgtttgaactaaatacagactttatatgttatagtgtctaaggttttggtggggttttttttaactctcactttcatctcttatgttttgacaatttttaattgtcaccttcttgtcagtcgaattgattggggataagcttgcatagcttgtacaaaaatttgaaggaggaaattgggttattgaagagaatagaagtttcttttatttatttattttttgccaatttcttagaaagttaggttaggaattagaaattattttagttggcctgattcctcctttatgtttgtgccaacttactgagtatcatgccttatcatcaactaattataacattcacttacagaaagagtataaattataggctaaatatatgttttggtatttattgtttgggtgctttttcaatttggtttctaatgtttaaaagtttcaatttagttccatgtgtttcaacatttaattataccctcattgacaggcttgtgattagcagatgtgacatgatactaattgagttggtagaaagtgagtataaattttgtcacctaagtgaaagttttccaattcatcctttatattttaaaaaagttgtcaaaattatcaaaaatttcttcttaaacataattcctcttccaaatttccaataatcagaagccaatttgcacattttttaacagtaagggtatcatcgaataatgttaaaacacaaaggactaaattgaaaaatttttaacattagggaacaagtcgaaaaagcatttaaatattggggaccaaaacataagttgttggaacataggaaattgaattgaaactttttaaaatctaggactaaattgaaaatacatccaaacattaaggattgaagcatatatttagcctttatctttgattctttctatgggctttaaatttacaaatccaacattgtgaaataaaataactagccatgaacgataatgggtcgtgtttgctttttggttaggatgtttctcgtattcattctctcagttgggaaacaaattattaaaagcttttattattattattattattaacatttctgtattttcttaatgttttgcaggtttccttccccaaattggaaacattaaaattacatgctttgaattcaggaaagatatggcaggataaacttgcttctagcttttatggcgttaaaactataacttctttgaccgtggagggttgtgcttcaataaaatatttgatgacaatcactgtggcaaaaagccttgtgaaacttgaacgcctcgaaataaacaactgtaagttgatgaaagctataatcatttcagaagatcaagatcgggacaacaattacccttccaaatctcatttgcaggaggtacaatttccaaccttatccatatttttttccttctaagtttagttggtaaactttgagcagaacaatgttgtcttcaaaaattttcattcatgtcaattaacttttaattttggacaagatatttagtttatattgttaaaatgagcaacgtgatacgaacatcacaccggacactccaaatatctccataatgatatgatattgtttactcttgacataagctcttgtgattttgccttcgaaatcacccaaaaggcttcataccaataggataattatcctcacttatatattgataatcattccttttcctagttaatgtgggattttatttacaacactgtagaatgctaatataatgctaatatagcacgctaattattagataaaaactgattgatctagtaacaaatggtagatacaagtgattggataaaattattatgcttatgttttaacttttgctaagagatgctaaatcatctaatattattataataatcatgccatatcaatattccgaacaagaggtatatatattacaaaggtttagaggcttggatagaatatttaaaactcaaggacttcagcttgtttatctatttaaacttaccatattatcttgatttttgagctcaagtgataattaaactgaaatgatgaatataatgcaggatgttttcccgagcctggagtccgttgtaatctctcgcatggatgctttggagacattatgggacaatgaagctgcttcaggatccttcacaaaattgaaaaaagtggacatcagacactgcaaaaaactagagacaatctttccaaattacatgcttaacagagtgacaaatctcgagagactaaacgttacagattgcagttccttagtggagatatttcaagtgaaaatgccagttatcaatggcaaccaagtagcagcctttgtagctaaccatttgaaagagttgaagctgcttcgtctacctaaactaaagcatatatggagctcagacccacacagattattaagctatccatctctgcaacttgttcatacaattcaatgtcaaagccttttgaatctgttcccagtatccatagctaaggatctcatacgactcgaagagcttaaaatacagttttgtggagtcgaagaaattgttgcaaaacaaggagacgatggagatggagatggagacgcgtcgttcgtgttgagtgggttgacatcgttgtctctttggaatttgttcgagttcaagagtttttatccagggagatatactttggattgtccatcattggcatcgctagatgtacgccattgcaaatcattcaagttgatggaaggaactttggaaaattcgtcactctccgctgttgaaaaggtatttacattctctctaattcttatgtacttcagtgtccttttataagcctcatgcatgattgatatcctaagttatctaggcttcgttaatatctattttatttttgagttttgatttcttagaattgtacttattttatttcgacttatttcgacttatttactatagtttcatcttttctgactaaacacttgacttcttaactaaattacaaaaacagaaaaaaaaatttaaacaatatttttttaagttttaaaaaatttgacttagtttttaaaaacactcctaattaaatagataataataataaaaaaaaatcaatagaaatagtgtttattagcttagttttcaaaaactaaaaacaaaaagaaaaacaaagcattagttatctattataattccaatgttcaatcatatagttcaaatatttcaaattgtctaagtcattaaataataatgaacctttaaatttaaatataattaatagtaataacaacaattttgaacgagaaggaaacaaagcgaggacaggaaacagagtggaaatgaagatgtctccatccccttttagcttacgtggattatttatttttctctactccttccttctgcctaaatgaagattttccatcccatagggttctgtccccatgtgaaaaaataacacctcaatatatgctcaagttggccagtcagattatgaaaaatcaagtttgtgagaagaaagtacataaactctcaaagggcaccctctattcattctcacttttagatctacaacatctctttagaattgtcaaatgagtttaactcaacgataattggcatgaccttcctccttaaaggtcagaggttgaatctccatttttggagttgtattaaaaaaggaaaaaggatctccttagcatcaacatattcctcttttggctcctcatctccccctttttcatcttttttattattattgtttttttaattgtgctttcaagctctccttgcaaacctatttcaaaatctcttgcaactacttacttctgtgacctttctttcattaatggaaaactaactttggccaaaaaattgcattcgcacgggttaatttttttttttttatttattattattattatttaaactcggatggataccattataacaaacattaagagttcaattttcaaaattttaagtttgttgatataattgtaataatcactatagttgagagttgtctgtgcactttactctaagaacagattgttcattactaaaatagtcaaataaagttgattgattttgattcattatggttataataataggttgaagatgatcaatcttccctaagagggaagttagaaagaagagaatcagatgcattgaaggagacatccacaaggaaagaagaaataacaaccatagtgcaagatgtagttgaagctgagttaactgaattaagagctcagttacaagctcttgtgatgggtcaaaatcaaatgatggaacgcttagcccaacttacaacaattgctaatgagactgtgtccaagtga

SEQ ID NO: 181 - DNA, 5631 bp, Cucumis melo
  source 1..5631: mol_type = genomic DNA
atggccatgtgtgccggcgccattcttaatccaatcggagaaaaaatcgccaactgcatggtggatcccgttttccggcaactagattatttgttccactttaaaaccaatgtgaatcgtctcaaagatcaaggcaagaagctggtggaaaccagagattttgttcaacattctgtcgactccgccaaaaccaatggagatgagatcgaagttatggtcactgaatggttgaccatagctgatcaatttagtcaagatgtcgataggtttttcatcgaagccaacggccgaagtcttcgatggtggaatatgttttcacgccatcgatttagtagaagagctaccaaattggctggggtagttgatgaagccattcaaggtgggggtttcgagagagttgggttccgcaaacctccacaagaaattatgacgctaaggaacaagttcgaagcctttgaatctagggttttgattctgaaggagataattgaagcgcttggcgatgctaatgcgagggtgattgtggtacatgggatggcgggagttgggaaaaccaccctagttgaagaaattgcaagattggctaaggagggaaagctttttgatgctatagcaatggtgactgtaaagcagactccaaacattaagaaaatacagggggagattgctgatcagttagggttgaaatttgaagaggaaaaggatcgaattagggctgatcgactacgtcgaaggttagagatggagaagaaggtgttactggttttggatgatgtttggagtaagcttgatttggaagctgttggaatttctagtcatcacaagggatgtaagatacttgcaacttctagaaaggatgacgtgtttttcaatgattttggtaatcagaaaaatatatatatcaatattctgtcaaaaaaagaagcaagggattttttcaacaaggtggcatgtgattctgttgaatcttctgatgatactgatcctgaaatggaagctgttgctattgaattggcagatgaatgtggaggattgccactttctcttgcaactgttggacaagccttaaaaggtaaagggcttccaagttggaatgatgccttgcaaggaatgaagtttcctggtgaacccagtaactatggggtgaataaagtggcatatttgtctctgaaagtgagttataaatctctaaacacagatgaagccagatcattattcttactatgtagcttgtttccagaagattatcaaattaacatcaaatacttgttgatgtatgccatgggtttggggttattaaacgccatgagttctctagcaatggcaaaatggagaatactttctttggttgatgagctcaaaacttctcacttgttgcttgatggggctgatagcgattttgtgaaaatgcacgatatagttcgagacacagcaattttgattgcgtcgaaaatgaagtccaaatatttggttagacatggtgctggagagagtttgtggcccccaatggatgagttcaaagattacactgcaatctcattagattgcagtgatcactcggaactcccagaatttatatgtccacagcttagattcttattactggtaggaaaaagaacatctttgcgattacctgaaaagttttttgcaggtatgcaggaactaagagttttagatctcactggcttatgtattcagcggcttccaccatcaatcgaccaactggtaaatcttcaaacactgtgtttagatgactgtgttttgccagacatgtctatagttggtgaattgaaaaagcttgaaattcttagcttgagagcatctgatattattgcacttcctagagtaattggggaacttaccaatttgaagatgttgaatttgtctgattgttctaaactcaaggtgatccctggtaacctgttatctaggttgacagggttgtctgagctatacatggacaatagttttaaacattggaatgtaggacaggtggaaggttatgttaatgcaaggatttctgaattagacaaactgccacggctgaccactctacatgtgcatattccaaatcccaccattctaccaaatgcctctgtctttagaaaattgagtggttacagaatactaattggagatggatgggattggtctggcaattatgaaacttcaaggaccttgaaactcaagcttgatagtagcattcagagagaggatgcaattcaagcacttctagagaatattgaagatctgtatctagatgaattagaaagtgtcaagaatattctattcagtctaggctatgaaggctttccgaaattgaaatgtttacgtgtaaaaaacaatggtgaaattgtgacggttgtcaactcggatactatgcatcatccacacagtgcctttccattgttggagtccttatttctgaaaaatttagctgaacttggaagcatttgtcgtggaaagcttccacaaatgtccttccgtaacttgaaaagagtaaaagttgaaagttgtgacagattaaaatttgttttcccatctttcatggtcagaggccttatacatcttcaaagcctggagattagtgaatgtggcatcatagaaactatagtttcgaaaagcaaagaaacagaaatgcaaatcaatggtgataagtgggataagaacatgattgagtttcctgaattgcgttctctggtacttcaacatctcccagcgcttatgggtttctattgtcatgattgcataacggtgccttcaactaaagtggattcacgtcaaacaatttttactattgaacctagttttcttccacttctcagtcaacaggtatgttatctataattgtacttcttccattgttatctttgagctaaatatagactaaatatatgttatagtgtccaaggtttttaaaaattagttcatgtagtttaaaagctctaactttcatctcttatgttttgacattgtccaaattattacatctttgtcggtcgtattgattggtgataatcttacgtatttggagagtcggacaaaaattcgaagtaggaacttggattattgaaaagtaaagttttctgaatagattttttgccaatttcttagaaggttagctataaattagaatttattttagttggcttaattcctcctttatgttcgttccaattcactttgtatcatgtcttatcatcaatcaattttaacactcaccatcaaaaagagtataaataataggtaaatatatacgttttggtttattgtttgggtgtcttttcaatttggttagaagtttcaatttagtcctattatgttttaacattgtgtaatgtaccttcattgttagaaaatatgaaatttgcgtgtgataaacaggcttgtgatgaacaaacgtgattaccaaggctatccataaaaaaaaaaaattgattctttaggaaacgtaactgatcttccaaatttcttatggtcataagccaatttgaaattttctaacgaagggtatgatcggaacatattaaaacaaaaaggactaaactgaacatttttaaatattagaaaccaaaatgtatttagcctaattatagttgataattgttggaaacttaaggaattgagttgaaacttttcagaatttagagactaaattaaagaaacccccaaccattgaggattgaatcgtatatttggcctttatctttctatggcctttaaatttacaaatccaacattgtgaaataatacaattagccatgaacgataatgggttttgtttgctttctggttagattgtttctcgtcttcattctcacaattatgtattgagtctttgactattgataaacaaattgttattttcgtaatgttttgtaggtttccttccccaaattggagacattaaaattacatgctttggaatcgggaaagatatggcaggatcaacttccttctagcttttatggcgttaagaatctaacttctttgagtctggagggttgtgcttcagtaaaatatttaatgacaatcactgtggctaaaagccttgtgaatcttgaacgcctcgaactaaacgactgtaagttgatgaaagctataatcatttcagaagatcaagatctggacaacaattacccttccaaatctatcttgcagagcaaggtacactattaacctcatccatatttcttccttctatgttttgtttataaactttaagcttaaaatgtctgtcttacaaattttcatttatgtccattaactttaaattatggacaatctatttagtgtctatggttaacataagcaaggtgatatggtcattacaacctactcctcaaatatctctataataatgtggtattgtccatttttgttggtataagctcttatggttttgcttttgaaatcaacaaaaatgtttcataccaaaggagataattgccttcacttatgtactcatgaccatttcccattccctaactatgtttagaatgcaaatataacattcttatgagaatataacattcttatgagataaaaactgattggttatacagcgaagaagtgataaatgcaaatgaccggattagaaataggtcaatatagatgggttaagttaatatttttatatgtcagcttttgccaagatatggtaaatcatgtaatatgtttataatcatgtcatatccaaaaaagaggtatatatattattataattttctaaaaaaaggttcagaggcttccagaatattcaaaactcaaggacttcaacttgttcatatatttaaacttaccgtactagtttgatttttgagcaaaagttataattaaattgaaatgatgaatataatgcaggatgtttttccgaacctggagtccctcttaatctctcgcatggatgctttggagacattatgggtcaatgaagctgcttcaggatccttcacaaagctgaaaaaagtggacatcagacattgcaaaaaactagagacaatctttccaaattacatgctgaacagaatgacaaatctcgagagattaaacgttacagattgcagttccctagtggagatatttcaagtgaagaaaatcccagttatcaatgccaaccaagtaacagccgttggagctaaccatttgaaagagttgaagctgcttcgtctacctaagctaaagcacatatggagctcggatccacacaaattcttaagctatccatctctccaacttgttcatacaattcattgtcaaagccttttgaatctcttccctgtatccatagctaaggatcttgtacgacttgaagtgcttaaaatacagttctgtggagttgaggaaattgttgctaaacgaggggatgatggagatggagatgatgatgcgtcgtttgtgttgagtgggttgacatcattgactctttggaatttgttcgagttcaagaggttttatccagggagatatactttagaatgtccatcattgacagcgctagatgtacgccactgcaaatcattcaagttgatggaaggaactttggaaaattcatcatcaatctcatccgcggttgaaaaggtatttacattttctctaattcttatatgctatttagcgtcctttttataa

SEQ ID NO: 182 - DNA, 8806 bp, Cucumis sativus
  source 1..8806: mol_type = genomic DNA
atggatataatttctcctgtcgttggaccaattgtggagtacactttaaagcctattggtcgtcaattgagttatctattcttcattcgccaacatattcaaaaccttgagagtcaagttgaattgttgaagaacactaaagaatcggtggttaacaaggttaatgaagcgataagaaatgctgaaaagatagaatccggtgttcaaagttggttgactaaggtggattccatcattgaaagatctgaaacgttactaaagaatctttctgagcaaggtggattgtgcttgaatttggtccagagacaccaattaagtaggaaagctgtaaagttggctgaggaggttgttgtgataaaaattgaggggaatttcgataaagtctcctctcctgtagctctttcagaggttgagagttcaaaggcaaagaattctgattttgtcgactttgaatcaagaaagccaactattgacaaaatcattgctgcacttatggatgataatgtccacacaattggagtgtacgggatgggaggtgttggcaaaacaatgctagtccaagagatttcaaaattagctatggagcaaaagctatttgatgaagtaatcacatcaactgttagtcaaacgccagacttaagaagaattcaaggacaacttggtgataagcttggactccgatttgaacaagaaacagaagaaggaagggctcttaagttactaaataggttgaagatggaacgtcaaaagatcctcattgtacttgatgatgtttggaagcaaattgacttggaaaaaataggaattccaagcattgaagatcacagtggatgcaagatcctatttacctctagagataatgatgttctctttaatgattggcgcacatataaaaattttgagataaaatttttacaagaggacgagacgtggaatttattcaggaaaatggctggtgagattgttgaaacatctgattttaagagtatagctgttgaaatagtaagggaatgcgcacatttgcccattgctattactacaatcgctagggcattgagaaataaacctgcatccatttggaaagatgccttaatccaactaagaaatcctgtctttgtgaatattagagaaataaataagaaagtgtattcttccctaaagttaagttacgattacttagattctgaagaggccaaatcactatttttgctctgtagtatgttcccagaagattatatcattgattgtcaggtcttgcatgtatacgctatgggcatgggtttattgcatggtgttgagagtgtagcacaagcacgaaataggataacgaaattagttgatgatctcatatcttcttctttgcttttaaaagaatcaaatgtcgatttggttatgtatgttaaaatgcatgatatagttcgtgatgtggctataataattgcatctaaagatgatcgtatttttacactaagctattccaaaggattattggatgaatcatgggatgaaaagaaactagtaggtaagcatactgcagtgtgcttaaatgttaaaggtttgcataaccttccccaaaagttaatgctacccaaagttcagttattggtgttttgtggaactttattaggtgaacatgagttgccaggaacattttttgaagaaatgaaagggatgcgagttttggaaataagaagcatgaaaatgcccttattgtcaccatcactttactctttgacaaaccttcaatcgttgcatttgtttgattgtgaattggaaaacatagatgtgatttgtgagttgaacaaacttgaaaatctcagcctaaaaggatcacatatcatccagatccctgcaactataagtcaattgacacaactaaaagtattagacttatcagaatgttatgcactaaaggtaattccgcctaatattcttgtaaatttgacaaagttggaagaattatatttgctaaattttgatggttgggaaagcgaagaattgaaccaaggaagaagaaatgctagtatatctgagcttagttacctttctcagctttgtgctttagcattacatattccaagtgaaaaagttatgccaaaagagttgttttcaaggttttttaatttggaaaagtttgaaatttttattggtcgcaaacctgttggacttcacaaaaggaaattctcaagagtgttgtgtttgaagatggaaacaacaaatagtatggataaaggaataaacatgttgttaaagaggtcagaaagattacatttagtaggatcaattggtgcaagggttttcccgtttgagttgaatgaaaacgaatcttcatatttgaagtatctctacatcaactataattcaaattttcaacattttatccatggacagaacaagactaatttgcaaaaagtcttgtccaatatggagcgtctggaattgagctatttggagaatttggagagtttttttcatggtgatattaaagatatttctttcaacaacttgaaggtcataaagttgttaagttgtaataaattaggaagtctttttttggattccaacatgaatggcatgttattgcatcttgagaggattaacattactgattgtgagaaggtgaaaacagttattttaatggaaagtggaaacccatctgaccctgttgaatttacaaatttgaagcgtttaaggctaaatgggttaccacaacttcaaagtttttactccaaaattgaacaattgagtcctgatcaagaagcagaaaaagatgagagaagcagaaatttcaatgatggtttactttttaatgaacaggtttgctttcttaatataaattctccaattgctttaacttttaatagtgaatatgtcagatccctccccagcactctcccttgcctgataaaggtgtgaagctagcaagtatcgtctgtcacgatactcttactagccagcttgacttgaaacaaacttcttttaacgttgcactaattgataatataaaataaaacaactctaagctcaacaccaaactttaaatcacacagcggaaaacatttttagcactcatgtacactttaaatcctacttgcttgaccttctctggtagttgcaggcatatccaaaaaaattggagatttcacttctaacttgaataacttaaatctatttatcataatgaaaaacttccttctaaaaacttgtttctaatcctcttaactaatattcgtccaaattttagcttctaactcctcttgaatctccagatatgtctatttccttgaattgtttggattgcttccaaatcttcactatctagacttccttcaaattttgaacatcatccttcttcagcaaattccatcctcaatacttagacactcttagctttgttttcattaatcaacgctctaattttactcgaaagaattgggagaactctttcacataaactaccctctttttttagagtaattatagtcgatggaaattttaagaataacaattaattatatagtaacatttttaaaaaatatggtaagtgtagtcaaatctaaccgtgatagacttcttcaatctatctgtgataaactaatatttataatatgatctatcagtgatagacttttattattgataaattttgacaaattttgttgtatttgtaaaatttttagaatgttattatatacttaattattttgaatctaataaatatgtttgttaggttggaatgtgtttaaaggctgccatctcctacttacttctcagtccattaagtgcatgtttaattttaaattttgccacgcatgtcctccactaaaaccatctaagagcacttaatctcaacacatggttgatccaactcaatacaccttactcggccacctagcctcaccaagcctcaatgcataggttgaagcttggccaccattaccaagcactttgccgtagctctctttggcggcctactcaggtgtcaatgtctagacctcttgtaaagcttgcgtccaacacttaaaacaaagttttccctttcttctaacttaactgtataacaaattaaattaacctatgctcccttcttcctaattatcaataacattaccaacaacaattacaacacaccaagcatgcatacttatgcttaagcaaattaaatacaagatctaggtttctctttcatttttgttttaaaattcaaaagtatcataaataaatgttgatgacttatgttgaaatataacagatctatccaagtttttcatcatggaaaatttgaccatttccgtctgatactcttaaatgatcttatagtgtattttctcaataaacttttggtaaaacatcgtttatacactcttaacttttaatattgtattaatttatatcttgaactaataattgtatcgatgtaaaatgtatcatttcacaagtgtaaatatttaccctcgttagattttgtttgaaaaacaacgtactaaacttatattttggattgcgaactaaacttctatatttttacccaattgtattaattctaatggtcttttttgtaaaaccaacttttgaaaaaaatctatacacataaatcagatttatgatgcaatgatgattctcaaagtaaatcctaattggtagtctaaatttatcatttatgagagagttttattttaattgcttcacctctcaaagctttgaagtaaaggttgatgtattttctaacttttttttttccaatagaagggtaggaggatttaaatctctaacctaatgagaggtttattatatctttttttttttttttttgagtaaaggtattatgtgacaaatattattgctgagttataatttttcatttatattttatatatttccttactaaatttaagaacttagtattacgtacgtactgaacaatatttacaacaaataacatacttgcatgcatttttggtgatatatattcgagctgaagtactaacaactatttgaaatgcaggtatcacttcctaatctggaggatttgaatattgaagagactcacaatctgaagatgatatggtgcaatgtactcattcccaattccttttctaagctcacatccgtcaagattattaattgtgagagtcttgaaaaacttttttcttcaagtatgatgagcagacttacatgtcttcaatccttatacattggaagttgcaagttattagaagaggtattcgaaggtcaagagtcgggcgttacgaacaaggatattgatttgctcccaaatttgaggcgtttggacttaattggactgccaaagctgcagtttatatgcgggaagaatgattgtgaatttctgaattttaaaagtatacctaatctgaccattggtggttgtccaaaacttgaagcaaagtatttaatccaagttcttgacaacatgaaagatctgacaatagatttaagaagattggaggagattttaaacaaggaaaagtcagtggtagaacttgatctttcattggagacgtccaaggtaaatcttctacatcatcttttattcgttgttttggaaaataaattatgttagtttgaacatcatgatataaaacaatataaatcgagatttttgaattagatgtctttcacaataacttgagttagcgtaacatgtgttcatccaataatgatgctgatgatctatgaattctgtttctctctctttgcatttcttataacttagattagattatttcttgatgagaagaaaaatctatgtaataagtaagaaccaatccacaaggttgtttatgtggttgtatagacacctccaactactatttaattaattaagctaataacatggagatttgtcacagtaatgatagttttgaatttaagataaatttaacgctaaatttttggcttcaaatttgtgtaaaaaattagggaaaattattccaaaaaatctggaaaaaataattttaaaaaattaaaaatgaaattcctgtaaagttagagtaagcttgtttttgtagagtaccattatacattacaactatgtaattgttggtctctccacaaaaatgaagctctcatgattagaaaaaaaaatggagaaattgtggagaaggaaaaatttgacaaaatatttataaaatatatcaaaacttcagattttatctatgataaacttctatcactatcggtatctattattgatatagactccaaaatattgtaaatattttagtttattttactatttttaaaaatattcctaaaaaagtaataaaaataatattgaactaaatattttacacgtgttgtatgactcaaattggcatagtttactatgtgttaagttttgagttataaatatattgaagttggcttgcataattagtataacatcttttagaaaaaagtatctttttagctcgagattaataatggactcgtttgatatctcgttgaccaaaatttaagtttgtagccaacatgaacttagctcaactagcacctcaagtggacaagaggtctcgggttcaaatatctaccccatcatttattacaatacatttgcaaaagaaaaaaatttaagtttgtagggcagttttataatgtctcgaatttgttttctatattattaattttaataaaattgttcttcctttctcactttactatatttttcaatgttttttctgttatttgttgattccataaggagtagtttcgattttctgaatggccacggtttgagatatttatagaaactaattgcaggatggtggagagttatttggaaaacttgaatttttggacttgtgcggttcgcttagtcctgactacaaaacgattactcatttgccaatggaaattgttccaatattacacaaccttaaaagtttgattgtgaaaaggacattcttggaagaaatctttccaatgacaagattgggtaatgttgaagaatggcaaaataaaagattcaagctttcctctttggcattaagggaattgcccaaacttaagcatttgtgcaacgaagacttacaaaagaattcttcgatgcttcaaaatttgaaatatttctccataaagggatgtgggaaattgaatatgtttgttccatcgtcaatgtcgtttagaaacctggtcgatttgaaagtgatggaatgtcataaattgatctatttgataaatccttctgtagctagaaccatgggtcaacttagacagttggaaataagacgatgcaaaagaatgacaagtgtgattgctaaagaagaaaatgatgagattttattcaacaaattaatctacttggttgttgtggatttgcccaaattgctgaactttcattccggaaaatgtaccattagatttccggtcttgagacgaataagtgttcaaaattgtcctgaaatgaaggatttttgtactggaattgttagcacgcctcatttgctaactgaaagtattatacactacgatgatgcaactaataaatatattccaatacttaaagattattcaaaagaggccattgtaaaagatatgaatgttgctattcgacaagtttgggagaaccattacgacttcaaccttcactgtttgtttgaagtagaggttagtacatacataagtttcgtttacaaataaaggtttgtaatattcaatattgttctatatatatatacacacatgtatgtatgttgatttgaattcttatgaatttatttatgtagaatctgaaggaggaaaaccaatgtgaatcttcttcacatgttgagcagttagagtaatgatgatatctcattactttatcagatttcatgaaaagggaaggtcagatgaaaagatgaaaccattaggtcacacagtgggttacttcaattggtattaaagttgaatattactttggtttttatagaattagctatacctactctattttcttttaactgaatagtttaccaatgcagaatttggaggaaaaccgagttgatgttaaaggaattatattcacacattgatccttcattatttaaaggacacagtgccttacgttccacgctttcatctctgttgaatgtttcacgcttgcgatacccacccacgtcccgtctcacacgactgccctccgttcaacccacgacgacgccgttgttgtctctgtccaatcgccaatcgctaatgctttcaaatcaaactcgtttgaattctaatatattttgaaattttcttttatttgtgtcgagtttaaagaagttgaattttggatcaagaattgtaagtggatttcacacttcttccaaaatttattttagactaatatgatttgataagaggttgaaagtatgttctaaatgttaaaatgtttgtttattttatttgaggattgattttatagtaataatcggtgaggttttcggtatatgaaattctctttcttcgtcaattcctcgtatgtattttgattgcatatttcagttattgtactttttggattgataccaaagcttccgtatagaattcattagaattttgtaaatccatgtcataggttcatctgcccttttcattagaatttaatggcgagatccttgaaattcattacaaccagttattttgaataatgggttgttaatggaaagttgtttgattctgaaagtgggaagctttggaggtgaaagtcaatggaagaaaacctattcaaatataaagagagcttatgaagaagaagaagaagaagaagaagaagaaaaagaagaagccatcttgagatgatggtgattgtttcaaatat

SEQ ID NO: 183 - DNA, 6194 bp, Cucurbita maxima
  source 1..6194: mol_type = genomic DNA
cagtccaaaggaagctattatatctcaaaactaaggtatgcctaatatttctattatttgttgtatattttcgtatgatattccatagaaaaataaaatattagaaaaagggtagtttggtaaatttagagtttgattcaaatttttaatctaatgatattattatttataaaaataaaattatgaaattacacgatatttaagtatttcagtcttgtatttatctaaccatatgaatgatatgaatatgagtttaatttgtggataaatccatttaattcaattagagaaaaaagaaaaaaaaagaaataaaaatatgaggtagtggttgtcataattttatccaactcatttattattatttatttcaaagacttgatattttaatggtcaaattcaaattccgcgcttgattgagacgatgaactgcgtcttcttaattctcacacatttctctgcagacccgaggaagacgaagaagaaggaaaaatggagatttgttctgcggccattgtcggtccaatcggagaaaaaatcaccaactgcaccgtggatccagttttccggcagctggattatctggtccactttagaagcaatgtaaataatctcagtgatcaacgaaagaagctggtagaaaccagagattttgttcaacacgctgtcgattccgccaaaagcaatggagatcaaatcgaaggtatggttgtcgaatggttgagcattactaaaaaattttgtgatgaagtcgatagctttttcaatgaagcgaacggccgaagtcttcgatggtggaatatgctatcgcgacatcgatttagtagaagagccacgaagatggctacggaggttgttaagaccatcgaagaagggagattcgagagggttgcgtatcgtatacctccacaggggattatgatgctaaacaatagtaagaagttcgaagcctttgaatctaggattctgattctgaaggagataattgaagcgcttgctgatgctaatgcgagcgtgattgtggttcacgggatggggggagtagggaaaacaactttagttgaagaaattgcaagattagtcatcgagggaaagcttttcgatgctttagcaatgacgactgtaacgcagattccaaatgttaaaagaatacagggggagattgccgatcagttagggttgaaatttgaggaggaaaaggatcgagtgagagccgatagactacgtcgaagattagagatggagaagaaggtgttggtgattttggatgatgtctgggctaaccttgatctggaagacattggaatttctagccatcacaagggatgcaagattcttgtgacttctagaaaagatgatttgtatttcggtgattttggtactcagaaaaatatcaagatcgatgttctggcaaaaaaggaagcaaggaattttttcaacaagatggcatgtgattttgttgaatcttctaacgattctgatcctgaaatggaagctgttgctactgagttggcagatgaatgtgcaggattgccgcttgctcttgccactgttgcacaagccttgaaaggtaaagggcggccaatttggaacgacgccttgcatgaattgaagtttcctagccaacccaataactacggggtgaacaaagaagcatattcttcattgaaattgagttataaatctctaaacagagacgaggccaggtcattattcttactatgtagcttgtttccacaagattatcagattaacatcaaatacttgttgatgtatgccatgggtttggggttattaaatggaatgaattctctagcagcagcaaaatggagaatactttcgttggttgatgaactcaagacttcttacttgttgcttgatggggttgatagcgatttcgtgaaaatgcacgatatagttcgagataccgcaattttgattgcgtctaaaatgaagtccaagtatttggttagacatggtgctggagagagtttgtggcctccaatggacgagttcaaagattacactgcaatctcattaggctgcagtgatcactctgaactcccggagtttatctgtccacagcttaggttcctattattggtggggaaaagaacatctctacgtttacctgaaaagttttttgcaggtatgcaggaactaagagttttggacttgactagcttatgtattcagcaacttccatcatcaatcgaccaactggtaaaccttcacacattatgtctagatgattgtgttttgcctgacatgtctatagttggtgaattgaaaaagcttgaaattcttagcttgagagcatcggatattattgcactccctagagtaatcggggaattgaccaatttgaaggttttgaacttgtccaattgtttcaaactcaaggtgatccctgctaacctgttatcgaagttgacaggattgtctgaattgtacatggacaatagttttaaacattggaatgtaggacatatgaatgagggaaatattaatgcaaggatttctgaattaaactacctgccacggttgaccactctacatgtccacattccaaatcccatcctactaccaaacgcctcggttttcgggaacttgactggttatagaatactaattggagatggatgggattggtctggaaagtttgaaacttcaaagactctaaaactcaagcttgagagaggcaatcagagagaggatgcaattcaagcactactggagaatactgaaaatctatatctagatgaattaggaagtgcgagtgcgagggatattctatatagtttagaccataagggctttccgaaattgaagtgtttgcgtgtcaaaaacaattctgagattgtgagtgttgtcaactcagatagtatgcagcatctacacagtgcctttccattgttggagtccttgtttctgaaaaatctagatgaacttggaagcatttgtcgtggaagacttccacaaatgtccttccgaaacttgaaaatagtgaaagttgaaagctgtaacagattgaaatttgttttcccatctttcatgggtagaggccttatacatcttcaaaagctggaaattagtgaatgtcgagccatggaaacaatagtttccaagggcattgagacacaaatgcaaatcaatggtgataagtgggttgagaagaacaagattgagttccctgaattgcgttctctgattctccaacatctgccggagcttatgagtttctactgttatgatagcttagcagtgccttcaactaaacgggattcagatcaaataatttctgccattaagactggttttcatccacttctcaaccaacaggtacgcaatgttccaattttctgattgacattttatgatggttcgattcgtgtttgcttctgtatggatgtttctcgtactcattctcttaattctttattgagaaacaaattgttaaaagctgttttgtttaacttgttgaatgtcttgcaggtttccttccccaaattggaaacattaaaattacacgctttgaatgcgggaaagatatggcaggatcaagttccttctagcttttctggcgttaaaaatctaacttctctgagtgttgtggattgtgcttcaataaaatatttaatgacaatcactgtagcacaaagccttgtgaatcttgaacgccttgaaataaacaactgtaagatgatgcaagctataatcatttcagaagataaagatctggacaacaatcacccttccaaatcgattttgcagaaccaggtacatttcttaaatttagtttctaaatttttgagcatattgttcttcttccaaagatttcaattgtccatgaactttaagttatgcatctatatttagtttctattgtaaacatgagcaacaaaatgctaatacacattcatattagatataacatcgttttctttagcataatataatgaacaaatggtaaatacaagtgatcggacgcagttagttcagtaaacttattatgtttgtaccattttggctaaggtatgccaaatcatctaggttgaaatagcgttttggttcacgcagattagttttcatttcattttagtccatatactttcatatgtattagtttagtctatatacttttagtgaatcttaaaaatagtcgtatcttaacaaattttgttgaaaataccatgactaaatttaagatttattgaaaggatgtgaaccataggaaagaccaaaattgtatttcaactaatcatctaatatttttataatcatgccatatcaatattctatagaaggaatacatggttatattagtgttaaaaaatcagagccttcaatggatagaatatgattgagacaaatgctgaatgcagaatgtttttccgagcctggagtcccttgtagtctctcgcatggatgctttggagacattatgggacaaggaagctacttcaggatccttctcaaagttgaaaaaagtggacattagacattgcaaaaaactggagacggtctttccgaatttcatgctcaacagactgacaaatctcgagcgattaaacgttatagattgtagttccgtagtggagatatttgaagtgaaagtgcctgttatcaatggaaaacaagtagcagccattgcagcaaaccatttgaaagagttgaagctgcttcgtctacctaaactaaagcacatatggagtacagacccacaaagattcttaaactatccatctctgcaacttgtgcatacaattcattgtcgaagccttttgaatatcttcccactatccatagctaaggatctctttcaacttgaagagcttaaaatacagttctgtggagttgaggaaattgttgcaaaaggaggagctgaaggagatggagatgaatatgaagatgcgtcgttcgtgttgagtggcttgacatcgttgtctctttggaatttgttcgagtttaagaggttttatccagggaaatatactttggattgcccatcattgacattgctagatgtacgccattgcaaatcattcaagttgatggaaggaacttcagaaagttcaacactctcctccgctcttgaaaaggtatttacattctctaattcttatacagtttagtgtcctttttctgatatgccgactcaaaaggatcatgcaggattgatatcaaacttatttagttatctattatagtgacaatgttcaatcacatttcaaattataaaaacattaaacaaccacaacaacaatattttaaaaaggaaggaatcgggcggggacgaagatgtctctatccttgtttagcttatgtggattcttttttcttcccctccctccatttcctgtctaaacgaagattttccgtcccatagtgtcttggccccataggaaaaagaacatcttcgactatatatgtccaagttggtgagtagatgctttctactttaaggagataatcataggtttataagtaagaaatactatctctattgatatgaaacattttgggtaaacaaaaaacaaagccttggacgcttatactcaaagtggataatatcatataattgtgaagagtcgtgattcctaggtctctttagtatcaacatatctcaaatctttcccttctttacattttctttaattatgttcttgagctctctttgcaaacctattacaaaagtgattgcaactactaactcttatataatcatatgagtttaatttttataatttcaagtttttagctataattgtaagaattagtagagttgtttgtgcactttactgtagtaaacatacatacatgttcttgacatcctgactgttcattattaaagtagtcgaataggggtgattgttttggattcattatggttccattaataataataggctgaagatgatgaatctacccagagagggaagatagaaagaagagaagcagatgtgttgaaggaggagacattcacaagaaaagaagaaataacgacgacagtgcaagataatgttgaagctgagttaattgagataagagctcaattgcaagctcttgtggtgggtcaaaatcaaatgatggaacacttggcccaacttacaacaattgctcgtgagggtatctcaaagtgattcctaatgaatggttggataatgttcctatttctggtcttttttttaataaaa

SEQ ID NO: 184 - DNA, 4257 bp, Cucurbita pepo
  source 1..4257: mol_type = genomic DNA
  misc_feature 423: note = n is a, c, g, or t
  misc_feature 3936..4142: note = n is a, c, g, or t
tctcagtagctgaatcaataatgggagaatatgtgattaaacccattggacgtcaactaagctatctcctctgctacaacagaaacaaaaataagctcaaagagcagctccaagctctcaagacagcgcgcagggacgtccaaggacgagtccaagaggcaagaagcaacgcatatgcaatccgcgaggaagtttcaaagtggttggctgatgcagacaacgccatccatgatgagctatcatcaaattcttcaaccccatcagcctttaacttgatcgatagataccaattaggcagaaaaacaaagaagaaaattgaagctcttcatgaactcatagccaaaagaatcaactttgtggaagtgggctaccctgcaccgcttttagagactaagaacatcattgttcctggtgggtatcttnatttttaatggaatgatttcatggttatttttgcggaatccattattcttactacatcttgttcatacctcaactttttttcacagaaagacaatttctttcaagtattttgatgattatggcatctgcaggatattcaaagagctggagtggaaattctagtcccaatagctgaatcaataatgggagaatatgtgattaaacccattggacgtcaactaagctatctcctctgctacaacagaaacaaaaacaagctcaaagagcagctccaagctctcaagacagcgcgcagggacgtccaaggacgagtccaggaggcaaggagcaacgcatatgcaatccgcgaggaagtttcaaagtggttggctgatgcagacaacgccatccatgatgagctatcatcaaattcttcaaccccatcagcctttaacttgatcgatagataccaattaggcagaaaaacaaagaagaaaattgaagctcttcatgaactcatagccaaaagaatcaactttgtggaagtgggctaccctgcaccgcttttagagactaagaacatcattgttcctggtgggtatcttgttctggaatccaagatttcaatggctaaacaaatcaagaaagcacttcaaaaggcagaggttagcagggttggtgtttatggcatgggaggcgttggaaaaacttacttgcttaatgaagttaagaagatggttttggaagaaaaagtgtttgatcgagtgattgaagtgtttgtaggccaatccaatggagttacacagattcaagaacaaattggagatgttttgaatgtaaaattaccaaagagtaaggagggaagagcttcttttctaaggaataatttggctaaaatggaagaggatgttcttattatattggatgatttatggaaggaatatgatcttctaaaagagattggaattccttgttcttcatgtaaagtacttatgacgagtcgatcacaggatatattgatgaacaacatgaacgcaacagagtgttttcaggtgaattctttaagcgaagaggagtcatggaagtttttcacaactatcattagtgatgagtttgatactcctgatatggagaatttggctaagatggtagcaagagaatgtggagggcttcctcttgcgcttgataccattgccaaggcattgaaagggaagcatatgaaccattggaaggatgctttaagcaaattaagaaaccccataggaatggatatcaaaggagttagtgacaaagtttatgcttcattgagattgagctatgatcatttagttggagaagaacccaagttagtgttccttttatgcagtgtttttccagatcattacaagatttctttgaatgatttgcaaatgtatgcaatgggtatgagattattgagaaacataaacacatgggaggatgtgaagaacagagtattgaaattggttcatgatcttaaatcttgttctttacttcttgaacattcaagtgataaatatgtcaaaatgcatgatattgttcgtgatgttgccatacacattgcatcaatggagggtatcatgccaacattgagctttggatctaagcttagtgattgggaagatgagtatcaaagtggagctcatcgtgctatctttgtaaactgtgataactttcaaaaacttccccaaaacttgaactttcctgatctcgagctcttgatattaagatcatcaaatgggtttgtgggaaatcttgaaatcccagatgggttttttgcaggaatggaaaagattaaagctttggacataacagggatgagtttcctccaaacttcttggagatcattgaagaacattcgaacattatgtctgttacgctgtgaattcaatcatattgacacaattggggagctgaagaacttggagatcttaaggatttgtagctgcaaggagctggatcatttacctgtggctatgaatcaattaacagaacttaaggtactcgaagtgttaaattgctcgaacttggaggtgtttcctgcaaatattatttcaagtatgaacaaactagaagtgttgaaattacgggacagctttgatagatggggagaagaagtatggtacaaagatgaagtaattaagaatgttacactttctgagctgaaccgtctgccacgcctttcaagtttaagattagagatctcaaaattccgctttatgtcgcagataacctcggaaacatcaagcaagttgaaagaattctgggtttgtgttaataaaacagatgattttattctccccatggtttctcatgaatatgcaacaactttgattcttaatattgttttaccaaaagccattcatggagggcttgaaacacttttgaaaagatctgaacgattggttgtaagggattcagtgggtcgttttataaacgatgttttcaatccaaatagtaatgggtatccatttttgaagtatctatggataattgatgtacatggacactcaaatttgccatacctgttcagatctgagttcaattccttggagttcttgactgtttatggaatggacagattgatgaatttagctcccaggaattctccaatccttcctttcaagaagcttaaatccatatcaattcgatcatgtggggagatcagaaatctgttctcaatctctgttcttaaagcgcttgcagatcttcaagatatttctgtgacggattgtggcatgatggatgggattgtatcgatagaaactgaagaacagagcactattttcactggaataacctctttaacacttgaaaaagtggataaacttaagagtttctgcaccaaattgttcatccaagaagacccacaaagaacaatcccctgttttgatcaacgggtttcatttcctgaattgaagcatttatcaatcaccagaggaaacaatttggaggcattatggcatagtgatgggttggcttcaaattccttcagcaaactcgaaacggtgagaattgaaggctgcaagcgattaagattcatgtttccatcgaacacaagcgcgaggttggacagtttggagaggatcgaggtgaaaaaatgtgggaatttgaagcgattactgccatcatcagtggtgttctggagcttgagtgagctgagcgtggagaaatgtaatggaatgatgaatttgtttagcttgacagtggcgaaagggctagtgaatctctggtcgattgaagtgcgttgttgtagaggaatgaggtgcgtggttgcggcggaggaagaacagggtggcgttgtttttaggggattgaggagggtgcgcttggattggttgccggaattggttagtttttacggtgggaaatgcagggttaagttccccaggttggatcgtttgttcattttaggatgccctaagatgaagacgttttcgcgtggagttgtagtgacgcccatattggatagagtttggattgatgtgagatactttggagtggcggtggatggtnnnnnnnnnnnnnnnnnnnnnnnnnnnnnnnnnnnnnnnnnnnnnnnnnnnnnnnnnnnnnnnnnnnnnnnnnnnnnnnnnnnnnnnnnnnnnnnnnnnnnnnnnnnnnnnnnnnnnnnnnnnnnnnnnnnnnnnnnnnnnnnnnnnnnnnnnnnnnnnnnnnnnnnnnnnnnnnnnnnnnnnnnnnnnnnnnnnnnnnnnnnnnnncttgaattgatttaagggtttccaaccaatcctttgggttttatagagcatttttgtttcccaaatttcagtttaatagcattttttatcttcaaattttagtttaatagtgtta

SEQ ID NO: 185 - DNA, 3265 bp, Solanum lycopersicum
  source 1..3265: mol_type = genomic DNA
agttttaaaccatacctcttttttgcttatttgagctctagtagatgaaaattttgatataaatacaaggtttgagtcaaagctactgaattctgtcgacttgtaactactatatacgggctccgccccatgttttgttagtagtatggtgattgaggcattatcaatcctcaaagaaaatgtatgggatccatacatgggacttgaggaaaaactagaaacagtaaaaagaaagatggaagtgttgattagtcgaaggaaggatatcgcggatgaggtaaaggatgcagagctccattcgagtaaaagacggaagacagaggttaaaaattggctgagtagtgtacaaaagctagaaaatgagttccaatgctttgagcaagaattagaacagagttctagcttttcgcgcataggattgtcaaatcaagctgataaaatacatgatgaagtggaatatctcctagatcaaggtaaattttctgaaggaattttgcttcatttgaatgaagagaagatgcaacagttggtgatgaaaaacttgaaaggtgaagcatttgtggagagtctaagaaaggtgttaacgtcgttgaatgaagtttcaagtattggcatttatggtatgggaggcgtggggaaaacgactcttgcaatgcatatacatgatcatctcctcaaagaatcaagattttggggtaatgtctactggattactgtatcacaagattttagcatttctagaattcaaaacaatattgctaataccatcggtctagacctttcgagtgaggatgatgacaagaagaggacagcgaagttgttccatagtttgaagaggaagaaaagttttgtgttcatattggatgatgtatggaacatatttgatgtaacaaaaatgggaattccactggaaattggtggaggtaagatgatcataactagtcgatcgtctgaggtgtgtgataagattggctgtcagaagaaagtaaaagtggaaactctttcaatgactgaatcatgggaattattcatcaagacacttggttgtcaatggggagatctttcgatggagatagaagaaatcacgaagaaaatgactaagaaatgtgatggattgccactggggataataactatggctgcaagtatgagaggagttaacgatgtttttgaatggagggatgcgtttgaagaattcacaaactcttgtatggaaatggaggatatgaacaatgatgtgtttccgattctccagtgtagttataaaagactgagagatccaaagctacaaaagtgttttctttattgttgcttataccctgaagattacaaaattcggagagatgaattggttcgccttctcatagtggaagagttacttgtcaaaaggaacagcaggaaagcagaacttgaccaaggctatgcagtattgaacaaattggaaagggcgtgcttactagaaagtgtcgtgaatggaaatggatctcgatgtgtgaggatgcatgatttagtgagagagatggcgttgcgaattgcaagagatgaaattaatttgatggtgagagcaggagcacaattgcgcgaaataccaggggagcaagaatggacagaggacttagacaaggtttctttgatgaataatgatatgaccaaaatttcacagccattatcctctatatgtccgaaacttacaactttgttattgcaaggaaattccagtctgagtcaagttatcgatccctttttcgtgcagatgcctggtctacgtgttttggatttaagctacaccgcgatacatcagctgcccagttctgtgtcaaatctagtaagtctctctgcattgttgttacgacgttgctatggacttagatttgttccatcattgaaaaatctcaagaacctcattgagttagaccttttccacacaattatccaggaagtgccccaaggtttagaaagcttagttaaattaagatgcttggacatgacaagagatgaaagagttccaaagacactatctaagaaaccagctgtagatattttagctaagctctctaatcttcaattcctctcgattccttttgtcgtacgagtagaagacttagtagggatgagacaactagaggtatttcatggaaagtttgttgatgtttgtagttttaatggatttgtcaaacatcaacagcaatgggggaagccgagttcctttgtaattgctttagatacaaaaagttcttccgagccaattttggagagtggtcatctttcttatgatttgaccttttacgctgaacgggtgattctaaggcatcttcttgtcactggagacagcgtagagatgctacgctatgaccagatagtagatgaagcgcgaaatgtgactcttctaccagtaaacattcaggagttgcttatttcagaatgtgattttcgtacgttgggtaatagcttgttagatgctattccatctctgattcagaccaaagacttgaggctaattaaaattggaagatgcaatgggatagagttcctaattaggacatcgaattgtaggtcaacgagacatcagggactcatgtctacttgtaatacactcgaaactcttgagagattggttctgcattgcttaaaagagttcagtagtctttgtaagttggaattaggagaacctttgcctcctgttggaaccttttcccatctccggtgccttgaagtttcgttctgtgataaaatgaagaagttaatcccgaagtggctgctgcaatacctccaaaatctcacagaaattgctgtaaggatctgcgatgaaatggaagagataatagcagatgatgaagaagaacaagttaaacaatgcgcgagctctgcctcatcatcgcctattattgttctaccgaagttgcagatgctttatttacatgcattgccagaactcaagagcatatacaagggaagaatgacttgtggttctattcaacgtgtaacagtttcgctatgtgggaagctaaagagacttccatttactcttcctcttcaaaatgggcagccatcagctccaccagagcttgaatatattagaatgagtgaaaaatcatggaaaactttggattgggaccatcctcaatacaagaatgtcctccatccttttgtgaaaaaaacatagatacaaacctcagtttacgtatatatatttctactcattgtttagattattgtagcatggcttcatgtatatggattatgtttaagctatatagttcattgt

SEQ ID NO: 186 - DNA, 3079 bp, Daucus carota
  source 1..3079: mol_type = genomic DNA
tggcatccggaagaaacatgaatacacccaatgcttcacaaaaggccaagcttaagagaccagaagctagttacagtactgtctatgaaacatgagttactgtccattgactttgtatagtatctctgtcaatatttactgaaatgagaaagaaaaaactagtcaaactttgaagttttcagcagaggcggctagtacaacctcaagattcttccctgtctgtgatgaagaaccatattttcatcagaggaaatggatattattactcccattatagcccttattagtgaattcattggtttggtttcgaaaaatataaacactgctggtgacttggataatagggggacttctctcaagactgcacttgaggaactaacagaagcaagagaagacttggagagtcaagttaatcaagcagaatctttaggattaacttgcacaaatcaagtcaaagggtggctgaaaagagcagaaaaacttgaatttgaggtgagattaatggttcaaagagttgatcagcaggaacaagacactgttttgtgctgctgtgcaaactgttgttcaagatacaagttgagcaaaaaggttctgaaaaagattaatattacaaaggagtttatggaaaagagtaaagcattagatatgaattgggttgatggaaatgtgattgtacctgtgatggagatccccagtgggcctgttattggcatggatgtcatgttggagaaggtttatgaattgcttgacaaggaagaggttggaatcattggagtttatgggatgggtggagtcggaaagacaactcttttgaaatgtataaacaatgagtttttgacactaaaccatggttttaatgtagtgatttgggttactgtatctagagaatttgttgcagaaaagattcagcaagctattatgtcgaggctgggcctgtcgtgggatgaggccgaggatcaagaacagctagcttcgaagatatataaggttttgaagatgaagaaatttctgttgttgctggatgatatttggagaggagttgaccttgagaagataggggttcctattcccaagaaggagaacaattgtaaagtgatattgacttctcgttctatggatgtgtgcagtgacatggatgctcactgcaagcttaaagtagattttttgagggagaaggaatcgtggcatctttttgcagaaaaggttcgtcgagatgatatccttaattctcaatccatacagccacatgcccaggccattgtcaagaaatgtagaggccttccgcttgctctaatcacaattggaaaagctatggccaataaagagacggaggaagagtggattgctgcaaaagaaatgcttaacaaatccccatcagaacttagaggtatgaaagatgtgttcacacttctgaaatttagctatgaagagttagctaatgacacgtttaagtcattgttgttgtactgttctttgtttcctgaggattgttctattgagaaagaattgcttgtagaatatatggtaggggaaggattattattgagctcccatgagatgggacacgccctcattggatctctcaaagtcgcttgtttcttggaaaagggtgaccaggaaacccaagtaaaaatgcatgatcttgtccgaagctttgttttgtggatagcgttggataatggagatgacgatatgaagttcttagttcagcctagtgcaggacttactgaagcaccttctgttgaaaagtgggaaagagcacatagaatttcattgatggacaatgaaattaccgaactatccgaagtacctgtttgccaacacttatcaaccttgctgctccaatggaacaggagtctgagtaaaatttcagggggattttttcaatacatgcctgttcttaaggttcttgatttatcatataccagcatcagagagattccaaaaagcatctcttatttgtgtgagttgcgttatcttgatctatccgggactaaattgagcacattgccaaaagagatgggaagtttgaaaaatctgaggtatctggatttgaagcgcactcattatctcagaacaattccccgcgaggctatatctggactttctcaattaagagtcttaaatctctactacagttatgtaggctgggaaattcaagatcttactatcgagaatgaaataagatttgtggatttggaaaagctgaggcatcttgccgctctagggatcactgtaactgaagtagaggccctggaggaactctttgtttttaaaaattgcatccaatttttgtacataacatcatgtgaacgcttgtataagttacatctctcattaaaccccggtgatggcaagaggttgagaaggcttagcatcaacgattgctctgatttacagtacctggccattggcagcaaggctgaaaacaactggttgcctagattagaggcttttgcactaaacaatcttcccagcttgatcaaagtgtgggaaaaagcagtgacacccggagcacttcaaaatcttcgttccattaccatctggtattgcaacaagttgaagaacgtttcatgggtcataaatctcccaaagctcgaaatgttgtacttgttttactgcaaaggaatggaagaagttataaatgtagatgatgtggaggccgggggagttgccaacacatttctgtcacttcgaacgctatctatgagagatctaccatgcttaactagtatctcaagatggaagatggatttcccttcattacaaaaaatcgctgtgattgaatgtccgaggctaaagaagttgccactaaagtctcctgaggtttcagcaccacagacatttacattgtatggtgagaaggcttggtgggatgaattggagtgggatgaagtcggtgctcagtctgctttcctaccacattttataccaactggtcagacaaattgataggcaaaaattaaagtatagatgaatactctgttctacttatttttgctacataatttcggcaaataccctatttgttaatataagagtcattattgcagtgaaattttattagagatttcttaca

SEQ ID NO: 187 - DNA, 4492 bp, Eruca vesicaria
  source 1..4492: mol_type = genomic DNA
taaggtttgtttgatggaacaagaggcattttggaacaatgataaacgggtaattaaaagaagagtcttttagttctctgagtgcatctgctttcaatgttgttagtaataacattaaaggaagatgagagctcaggaaaagatgagtctttctctttaccacacacagtttagttgatcctgctgctttgttctatatgttatgtggtcccagaggtattaagctagttttttttttttttgaggaacaagattgagttagttatggttttcgtttgtcctgctgtatattgtcagggggtgtttcgacttgatgtctttgccagtggttagatcgatcaatatggatatatcttcacagcatattttagaggcaaatattaggatttagagacgtatctgttattggggattttaggggtaaaggtagcttgtgacttgtgagagttaggacctctaaaataatcccttggttctaagctcatacatggttctttgcagatatatatgagagttcaattagtttcttagacaattcctttcttaagccaacttattcttttgttcttatttacagtatgaatgattgaagaaaccaaaggtggggggttatatacagttatctcaaccttctgttttcctctccaagtttctcacataaaggaagtgaaagggaagatgctaatctgttgcgtccttcaagagatagttcggtccaaaaggagaactgatgcttctccggttccgagcaaaggattccatggctctgtaaacttatgaagtagctagaggcgagcttgcccttccacctagcctcagagcatgagccgctattttcaactcagggttggaaaaggcacagagaaaagactgcaacctctcttgtaagtatttcatctcttattgtttttgtctatagaaagtggggatgggttcgaagttgacattttgagaaagacagtttgaatatgtctgaactacagttaaaacacgagttaaccaaataagagtttctattatgtctaaaaagttaaacaaccaatatacctgaattcttactagaagttttaaaataaaatggggaagaaatcttcaaggcaagttgttggaaacttcagatgtcaaatcatcgatgaccaaatcaaagtcttgttatttatttatgaagatcattaaaagtcaataaagtcattggtgcttcgtagtaggtttatcttgcggatatttgatccatggttcttaacattcattattaaacctctcttgttttttaatctctctctgaaactctttgtcatggattgtctaggctcaaccttgggttctatcttggcagaggcagggcgtggtatatgcagatcaacctatgctcgagccattaataccattcggttcaagtcaaacatcaacaatttaaagaatgcgctcagtggccttgttgatgttcagagcaaagtggaaaaagacctcaaaaccgtggagatcaaagggaagtccttgcatgtgcaactaaggagatggctaagagatgtggaagagattgtctccaaagcaaattcaattgaggaagggcgtgtttcatgtgctctgtccttgagatgtaagcggagtaaaaaacttgtggtagttcttgagaaagtcaagaggcttcagaagcaaggcgtagagcttctcgacatattctcttttgaaggcagatctctagttgaaaaaatccttggaccctccatccctgatcaaacaatagcatcagagatgttagtcaaagttctaaactgtttgatgagagatgatgttcaaaagatcggtatttggggcatgggtggagttgggaaaacaacacttgtcagagaactgaacaataagctatggaaagaagctgatacgcagcctttcggtatggtgatatgggctacagtctctaaagagtttgaattgggaagggtccagaagcaaatcgctgagagattggatatggaagtgaaactaggagaaagcgaggaaacactggcgagacggatacatgaaaggcttgagaaagtaagtagctttcttctcattcttgatgatgtctggaaagccattgatttagaccagttggggattccacaaacatatggacgcaaggctacaaagattgttttgacttctagatttttagaggtttgccagagcataaaaacggatattaacttcagagtggattgtttatgtgaagaagaatcttggaaattgttttgtaaaaatgctggagaagtaactagattagattgtgttggacctatagcaaaagaggtttctcgggaatgtggtggattgcctttggctatcatcacggttggaatggctatgcgagggaaaaagatggtcgaaatctgggaacatgcccttgaagaactcaagagttcggtgccttatgtcaagagtattgaagaaaagatctaccagcctttgaaattgagctacgacttgctcgagccaaagatgaaatcttgcctcctcttctgtgccttgtttcctgaagattactccatagaagtagctgatctcgtgaggtactggactgccgaaggattcattgatgaaacacaaaaccatgggtacttaatgaaccaaggaatcactttggtagagaatctgaaagactcttgcttacttgaagagggtgctcatggtgaaacagttaagatgcatgatgtggttcgtgattttgccatatgggtgatgtcttcctcacgagatggtagtcactctcttgttatgtctggtataggcttgtgcgagtttccacatgagaagtttgttccttctatccgtagagtttctttaatgaacaataagcttaaaaagatcccgagtaaggtgttggagtgtgttgaactctcagctttgctgctacagggaaactttcacctggaggagttgcctgtgggattcttgatatcttttccagcacttcgggttttgaatctaagtgggacatgcataaggtcgttgcccaactccctgagcaagcttcatgagctccgatctctcatcttgagagactgcttctatcttgaagaagttccttcccttgaaggccttacaaaaattcaagttctggatctttgtgccactcgaataagggaaactccaagagggttggaaactttgaagagcttgagactacttgacctctcccgtacacatcacctcgaaagcattccagcaggaatcatcccacagttatcaagcttagaggttctagacatgacccttagtcatttccactggggcgtccaaggacaaactcaagaggggcaagcaacacttgaagagattgcgtgtctcaaacgtttatcagtcctctcaatcagagtcgtatgtgttccacctctctcccctgattacaattcattgatagaaaggttaaagaagtttcagctgttcatcggcccaacagcaaactctttaccttctagacatgataagcggagagtaacaattagtagtctcaatgtttcagaagcattcattggatggttgctaaccaacacaacttctttagtgatgaaccattgctggggtctcaatgagatgctggagaacttggtaatcgatagcacgagtagcttcaacatgttaagatctctaacggtagagggttttggtggaagtataagacccgctggtggatgtgtcgcacagctggatcttctacctaacctcgaagaacttcatctgcgtcgtgtaaatctgggaaccattagagagctcgttggtcatctggggttaagatttgagacactaaaacatcttgaagtcagcagatgtagccggctcaaatgccttctctccttagggaacttcatctgtttcctgccgaacctacaagagatacatgttagcttttgtgaaatgcttcaggagctgttcaactattctccaggagaagttccaacctctgcttctgtggtacctgctctgcgtgtcataaagctaaggaatcttccgcggttgaagagcttatgtagccaaaaagagtcatggggatgtttggaacatgtggaagtgataagttgcaatcttctaaagaatctacccattagctcaaataacgctcacagagtcagagaagtaagaggagaaacacactggtggaacaacttaacttgggatgataaaactacaatagaaacccttcaacctcgtttcgtaccagctgatgggaatatacctactgcctctcttggaatctcttgttatcagagcttcaacacaattgaagaagcttctccaattcctagtagatcaggatctcaggctgaggagcttatgtagctacaatgtaatcatggacttacaaaggatacgtggctcacttacaatctcttgtcacagagttctagtttgatctaatggagagagaggagaggcttctccagtttagatagatgacctaacggctgaggagcttctggatggaaaatgtaattgcagaaagtttcag

SEQ ID NO: 188 - DNA, 4421 bp, Glycine max
  source 1..4421: mol_type = genomic DNA
tttttctacaacgtgttaacttttcaaattaccaataccacgcagcctatacaatctcacggcaaagacttggcaacgcgcgtggcttcattttctttcttttttaacaaatgctgaattcaaccattcttgcatgctcatatttttccatgcttcttactgatgggtctggtcctgttggttcacacgcacctagatcattgtgatcatttgaacgcagaataaggatcactacattagaaagctctttgtgtgtcacctgaattattcattcgaagaattcaaatcctatattcaggtaaacattagcgtcttagctccacggtttctcactttttttttttactgttttaattccttgccctcagttgagtaaattcaatttcctttctctttctggttggacagtagtcagagttgcttgttttcttttgtaactgtattttgttagtgtgatggttcttttctatgattgttgatatgggagcttcataattctagaaattgaattttcaatttttcatcttatgttcttggccgttgtttccaattttttatttgaatgctttgtgttggaaagatgatatcatgcttctttagttctccacaatttagtttaactgaaggacattttttttatagtataggtcaaacaaatgaatataatttattggcaatctggttctccgagggattagttaccaataaaatcggttcctattaagagagttagcagaagctgggaacatgaacatactaataagttcaatgagattccttaaatctggatattctgcaggcacagaatgtataattgagccatgacaatttacaaatattctttttgcatagtagtagttcgtttattgtataaccttaaaattacaacatttgttcttttttttttttacttggtactattttactgttgtgttttgtttagggaacttttcctttaacaactttattttctttataaatataggccacagaacttttgcttgatttttcttttgtttgcttttctgtttctctttctgcaggagcatgctatggctactaggatcatagaaagcttggtaaaaatcagtgaaacatattctctaatctttgatctgctctacggattcaacagcttcaatgataatgtacaagtgctagaaatgaaactagaagagttatgcagcctagaatatgacataaacaaagagcttgaaattgcagagctacagcaaggcaagaaaagaaaacgagaagttgaaaattggcagagaaatgttcaaaggaagaaaattgaagtctatggcatagttcaggaattgagggactgtggagtgtttaagcatctaaagttaactgcacaagtaaagaaactaataggacaagtgacagatcttgtggagcgtggtaggtttcctaaaggaattgtggggtgtgcacatgaatctagaggatatgcattgttgacaacaaaattagcaggtgcaatgtttcagaaaaatgttgctaagatatgggattggttgatgaatgatggtgagttgataattggtgtgtatggaatgggaggagtggggaaaactagtatgctaatgcacatacataatatgcttttaacaagagtcaccaactttgatagtgtgttttgggtgactctctcacagtcatttagcattcacaaattgcagtgtgatgtagccaaaatagttgggctagatatttcaaaagaaagtgatgaaaggaaaagagcagcaagattatcatggacattgatgagaaggaaaagatgtgtactttttttggatgatgtgtggagttattttccactagagaaggtgggaattcctgtgagggaagggctaaagttggttttgacaagtcgttcattagaagtgtgtcgaaggatgaattgtcaaaacaatgtcaaagtggagcctcttgctaaggaagaagcatggaccttgtttctagataaccttggacaacagactactctttctccagaagtaacaaaggttgctaggtctgtcgcaaaagaatgtgctggtttaccccttgcaattattacaatggccaggagcatgaggggagtggaagaaatttgtgagtggcggcatgctctggaagaactaagaaacacagaaattaggctggaagaaatggaaatggaggtactccgtgtgttgcgatttagctatgatcacttaaatgataacatgctacaaaagtgcttcttatgttgtgcattatatcctgaagactttgaaatagacagggatgttttgatagaaagttttgttgatgagggactggtgaatggaatgaaaagtttggaggctatgtttgatgaaggacaaaccatactgaataagcttgaaaacagttgtcttttggggaaagtggaaaattatgttggtggaaaaaaatgcatggggttacaggatgccagcagtcatatagctatcagcatgatgaaaaggggatgccaatgtgtggcaccaatagataatgtggaaggctattatgtgggaagtcaattggtgaaaatgcatgatttggtgagggctatggctattaatgttataaaggtgaactaccattttcttgtgaaggctgggttgcaattgactgagattccagatgaagtagaatggaacgaagacctggagaaggtttctctgatgtgtaattggatacatgaaattccaacaggcatatcacctaggtgtcctaaacttagaaccttgatcttgaagcataatgaatccctgacaagtatctcagattctttttttgttcacatgtcttcactccaagttcttgatttgtccttcacagacattgaggttttgccaaaatctgtggctgacttgaataccctcactgctttgttgctaacatcttgtaagaggttgaagcacatgccttcgctagcaaagctgcagaccttaataagattggacctatcttttactgcgatcacagaaatacctcaagatttggaaacgttggtcaaccttaaatggcttaatctttatgcaaaaaatttggtgtcaacaggaaaagaaatagcaaaattgattcacctgcagtttctgattcttcattggtggtccagaaagataaaagtgaaagtagaacacatatcatgcctgggaaagttggaaacatttgctggtaacttatacaacatgcagcatttcaatgcctatgtgaaaacaatgcatgaatatggacctagaagttaccttcttcagttagacagtgaagagtctcctggtaaatctccatggtacttttttgctgaagtttgtttcagcaaggatgtgatcatttcaaactgcaaaatcagaacaggagtaacaccccttatgctcccttcagacattcaacgcttgaaggttgaaagatgtcatgacataagaagcttatgtgatattttgtcattaaaaaatgccacttctttgaagcgctgtgagattgctgactgtgatggccaagagtacttgttttctttatgttgctcttcctcctgctgcacctctcttcacaacatagaatctgtggaactctattacctgaaaaacttgcacactctttgcaaggaaaacgaagctgtggctcaaacccttccacctccaggagcttttacttgtctcaagtatttttgcatctaccattgtcccattatcaagaagttgctgacaccaggattgctagcctatctacagaacttggaagagataattgttcataattgcaagtcaatggaggaaataatttcagtagatggcatagattatgaaagctctggtggtaacaaatattgtgtggctaatagagatgctgttaaagtcacacatccaaagttagtatcattatcattgaagcacctaccagaactcaggagcatatgtagaggactaatgatatgcgagtctctacaaaactttaggatctttaaatgccctaaactaataaggctccctgaaactgctaccccagttcagactttgtacgattgtttctgactctgaccaatcaccatagactaggttgactattagattttgatatacaaagtctattaatcttgagagattttgatggggttgggtgattaaaatctaattgaaaatttgttggttgaaatgtaaatattgaaacgttgaagacaacataaatctcttaataagattagttgattgccttgcctaattcctcaagtcctcagtaaagactgttctggcaattctggggtggaacgtttggtgtatagaaaactaatgttcaatgtgaatgtagaagtttatcatctcaccttgggtttcatcttccatgttatgattgttatccaattgcgtaattcggcatcatagccatatctctgtaaataatgaaaaacctatatttttttcttc

SEQ ID NO: 189 - DNA, 2853 bp, Helianthus annuus
  source 1..2853: mol_type = genomic DNA
atggatgttgttgtagttgacggtgccaaaacagtttttgagttcatctgttcaagaattaaggcactttccaaatatgaagaaaacattaacgaactccgggaagagattgcaaacctcacagaaaaaaagatggcaattgaagaagatatcaccttagctagactggaaggaaaaagcccacagccgcaagtaaacgaatggttgctaaaggtttctcgagcagaagacgatgtacggcaactgctagaaatggctgatgcaaatgctgttggcaagggatccaagatgatgcagtgctggacagtggcaaagaaactcaacctggtgaaagagctaaattctactcattgtgaaaaacgctccccgataaaatctgtggtggaaatggcagtgccgcctcttgtggggcagggagcagcatcggatatgaagcagcttttggaaatcctgaacagggatgatatcagaaggattgctgtctggggaaagggtggcataggaaagacggctttggtcaagaacctgagcaatgagctttatttttcctatccaaatctttttgatactgtcatctgggttcaagtttccagatcattggatttgagcatgattcagtctcagattgccaaaagagttcatctaaaagtggaagctggagacaccactcacagtctagctagcagaattcttcaaggactgaagctaagaaggaagaccctcctgattcttgatgatgtctgggaaaagattgatcttgatgctgtgggtgttccatcaagggatccctgctgtaagatccttttaaccacacgatctcgtgatgtgtgtaggcacatggaggttgatgttttttttcagttaaaactcatgagtgaagaagatgcttggaaccttttcgttcacagtgcaggacccgtatttgatttaaatggaatagaatcgccaacaaagaaaattgttgcagctttcagtgggctgccattagcaatcaagactcttgcaaactcactgagggacagaccacatatggaattgtggcaaaacatgtatcttaggtaccgctgttcatcccccttgttcaagaacattatgaaagagatattcgggactctagcaactagttatcattccttaccaagcaagattctaaagcaatgctttttgttttgttctttatatccagcaagctgttcaatcgatgttggtgaactgatccagtgttgggtgtctgatggtttaatcattgagaacctaactgtagaggaaacttttaattatgggcttgctttaattgaatgcctgaaggactcgtgcctactggatcaagattcagaaggaactgtaaagatgcatggcatttttcgtgacttagccataattctgtcgcagagtcaagaactgtcgtatgggtttcacacccagtctggccttccattctatcagatgccaaacgagtcttctagaagagtttctttcatacgttgcaggatcaaaaagttgccagaatttcctgtatattcccagctgactgtgctttttctccagggcaatcctatacagaaaatccccaacgacttctttcacaatcttatctctttaagggtactgaatttaagcgaaactcgaattacttctttgccaccatcttttctttgcctacgtgaactgcgttctctctttcttagaaactgttctatagaaaagctaccttctcttacatctcttggtaaactattagtccttgatctttctagcaccagaataaaagctttacctaatgggtttggaagtttacgtagtttaagagaattaaacttgtcatgcacaccttttttgaataaaatagtagctggaagcatatcaggtttatcaaggctcgagactctagatatgtcttttagttcttataactggaacccaaagacgacttcagatcaaaaggcaaaattcgatgagttattatcattggaacacctatctatccttcgaataagacttaactcggttaagtgtcttgaatctgcatcttttttgctcaagaaattaacaagatttaatatccagattagcccatggagccatgactcaaacaatcacattgccaaacacaatgaaaaacggttggttcttagaggagttgatctcctgcaagaagaccttcgagatcttctacacaacacaagttctctggatgtgttaacgtgtgtaggcatgacccggagacacttgcttagcctatcatcattgatatcactcactatatcaaactgtgatgatataacacgtttaataagcaaggaaagaagttccaaggaaatgcttccaaatctacagcatttggttcttgatcatttgcaaaatttagagactattgttgatgagataatcccaagaggccagtgcctcagaaatctgacaacaattcaagttttggattgtccaaagttaaaaggagcggtatcttatgcactgcttcgtcatgttaaaaaacttgaagaaattaaggtaagcagttgtgaaagtctgtcttggatcattgaatcaggggagcatgaagaacctctgcctaatttaagggtgttggagataagcaacatggtcaacttgaggtcaatctatgttggtacatcagtttgtcccgcattgcagcggattgaagtgtcttgttgtcccgagttgaaggaacttcccttctcaatatctgatttatccagtttgaaagagattagaggtgagatcaagtggtggaacaatttaagatgggaggatgatgatgttaaaaacatgtttctgcaatactttcaagcatacccccaggagaattgttcaagaaagagaaaatacaagtaa

SEQ ID NO: 190 - DNA, 4151 bp, Lactuca sativa
  source 1..4151: mol_type = genomic DNA
cacgtgttttgcacggaccttacgatcattattaatggtttactttggccttcggcaagttgactccgaatttgatcatgaattaaacttttggcgattgttcaacttcaaggtaacaaacaattatcataccatggattttaacttaaattctgttcaaacgaagcctttggttttccaatttttgattctacctttgagtattcatcgtcacttgtacagttgactgttaattttgaattttactccttgaattcattccaaggattatgcctttgatcttatccactaaaacaatcgtacatttctgcgtcagatactttcgataatcaaaagtaattttgctgcggattgaacaacaaacttatttgaactatcgtgctatcggtcgaagaatttacctataaaattttcagattcatacagagttgaaacgtaagtcctttgacctcaaaaagtgaacctgcacttttttttcacttctttatttccttgtctccttgcctacaaatttgttgtgagttgtgtattgacttacacgcttccgctatgtgattctctgagcacattgagaaaggggtggaatctcctttccttcattgtattcgggattaagaaacgggaatctcctttccttgtctgaaatttctcctttctttttaagatcttcattcttaatgaaaaagttgaagggtttgtcttatcatctgcttcttttgtaaaaggaagtagaataactttttaatggctctagatgagctgcacaagagtagcaaacacatattttgaaaattattttccaccttaggtgatatgaattgtgattatccttttgtttgctatgtataagaatttgtaatttgaaaatcagggttatggagtcagtgtaccataaaaccagatcgctatagtatcttattgtgcattttctttcattttcagggagcatggacattgtttcaagtagcttaacggctgtttccttgttattgtcacctcttgagaagcttctcttctattcaagaaatttcaaagaacgagaaaggacactgctttgtgaaatggaagagctaattagtaaagaaaacgatttaaaagcagaaataagtattgctttagtgaaccaaagaaagaagctcagaagcgagacacaattgtggcttaaaaatgttgagaacctcatagctgaggttaagaacatagaaactgaaatcatccaaaacaagagatgtataaaagaatgtttccctaattatcgttcaagatacagactaagcaaaaagatgatgaaaagaatcaatgatatgcgtgagcttcatgctaaaggagtattctcaaacgggctatttgttgattcttttccaaatcctgggagaatcctaccaacaagtggtttagtgggtgataaaacatttcaaagtgtttcaaaggtgatttgggaagtattaggtgatgtaaatactagtaagcttggtgttcatggaatggggggtgttggcaagacatctgttatgatgcatatttataaccagctaatcgattgtaaggtttttgataaggtgatttgggttaatgtttcaaaaacccttaatgtggagaaattgcaacttgatattgcaaatgctatcaatttggaactctcagaagaagaaaatgtgatatggagatcaacaagattgcttgaacatctacaagggaaaaagtttgttctcatcttagatgacatgtggcaccatttctccttagaagaggtaggcatcccacatccaaccactgacaatggttgcaaatttgtaattataactcgccttatggaagtttgtcgtggaatggaaactcaaagggaaatcaaggttgaactcttgtccaaaaacgaagcatgggatctattcacaaccaaatcaggtccaatttgtgaagaaatagaatctattgcaaaatcagtgtgtgaaaattgtgggagattgccacttgcaatcatcacagtgggacgtgccatgaggaaaattgaagataaaagactttggaagaatgcacttgaagaattagagtcctcaagagcagaaatttcaggtatggaagaagatgtgtttgctagactcaagtttagttatcttcacttaaaagatgaccacatccaagcttgttttctgtattgtgcattgtaccctgaagatcataagatcaaagcttctgaacttatagagtactggatggcagaagagttgattactgaagtaggtgatcgagaaaaggaaatcaacaagggttacacagtgctaaaaaagctcaaagatgcttgcttgttggaagacataggatccgatcatgtcaagatgcatgatttagtaagagacatggctatcagaattgctagagaaagtccaaggttgattactaaagctcaaatgaaattaaaccgaatgaaaagagaatggattgaaaacgttgagtgggtgtctttaatggacaacaatattaccatttttcctgataatcccaactgccaaaaactatctactttgcttcttcaaagaaaccctcttcctgaaaagattcaagattcgttctttatgaagatgcagtgtcttaaagcacttgatctctctggaactggaataaaatcactaccagagtctgtttcaagtttatgtaatctccgtgcactttttttaagcttcagtaagatcaaggagcttccttcattaaccatgttgaaggagttaagggtgttggacttatcacatagccgtttgagaaagctaccacatgatatagaaaatttaaacaatttgaggcgtttagatttgtcttacactgaaaaactacaaacattcccatctggtgctatccaaaagctttcttgtctagaaaacttttccatgttcaaaagcaactggaggtggtcagcaaatagagatggatttgaatcatttgatgaaatttcaagattgtcacggttgaccagtcttggactttcctttgaggacaaaaccagcttcattggctatgtgaaatccaaacaatggttggttcttgaaagttatcatcttggaataggtcagttaaacattttgctacccactgttgaaggaatgcgtagcattgaaattcaagattgtaacctttgtcatcaagacaaaatgattgagcttccaaacaatatccaacaattggcactccacagttgtcatgatattactattttatcagagctttccgacacaaccaacttggaaaatctgagacaatgttacatctcaaactgtaatggcatggagttcatcacaaaagcagataacttttttccaaatcttgaactacttgtcctacgaaagctgccaaagttgaaagcaatatgtaatggtattacatcgagtcagattttcacaaaggtgaagagcctacagatccacagctgcaatagaatgaagtctttgttttcatctcatatgctacaagacttccagaaccttgaagagattgaggtgtggaactcaagattgattgaagaaatggtggaagaagaacaaagtggagggaatatcagtagcttttcaacagttttacttccaaagcttcgccgattgtccttgtccatgttaccagaattgaaatacatcacaagaagggttttgatttgtgattctcttgaaacagttgagatttgggattgtgaggttttgagggctcttccattctctattagctacttgccatcatctcttaagaacattaagggaaacataaattggtgggatcagttagaatgggatgacactagttgcaagaatcttctgcaaccattctttgaccaaggtacataaatcttctgcaactaactagtgacaactttctgcattagttgcaagatctggacttaatagggcgttgagaagtcggctacatcacaagacacaaatctgccaaaaaggagcagacctgacattagcaagacaggatgctgagaaatcattgtggaaaacaatgtcaccaatgtagaccctaggaatgattcatagacatctgaggtgaggtgaggtgaggtgaggctcattacaaacaacaaacacaacaacttgatgctatgttaaaattatgtatccatctatatttgtctcttatagtaaactatctcatatttctaacta

SEQ ID NO: 191 - DNA, 4347 bp, Nicotiana tabacum
  source 1..4347: mol_type = genomic DNA
atatcaataaaatgatgctctttgtttcataattttcactcatttttatggtttttcacagagacaaaaaaagatggtctctcttgacctctttgcttaacaacacttatcatcggagacaaaacaaaagttttaaggtatagtgctctttctagattggaatttcttgtttttttctttaagatactctgggcttgatagataaattgcttagtaatagcgcgagttagccactttttagccatgtattgaaaaatagtcattgtcatgaagttttatatttcataggtaaacctctatgtcaatatcctggaatttcacatgtggaatttaaaatttatagaagaaatgtcttcagaaaaataattcatattcttggtatttagttgtaagaaagtatgttttaaggaaaatattgttgagtcccacatcgacaatgaaggggatgagtgatctccttgtatggtcgtagacaattctcgcttcataagttagcttttggggttgagttaggcctaaagtctattttatcaaatatttttcaccaaaaaggttacaaccacctcaaactcttaactccacattactattctagctaacttatacattctcatcaatttttaataaacattttaaaaaaaatattttcactttcggataaaatattggaaaatatttttcaggaaaataagtcaaaagaaaaaaacatattctcaaacatgttttccgtcgtagcgagtgaaaattatgatttcctcaagggaaaaaaccgattccattgtaccaaacattaattgctagcatttgcggtattttaaagtttatttacacctataattttactctatactctttccatatttctcttgaactcagcttacaactctatgttgtttatgaaaatgtcctttagtttattttcttgtttgtctatttttgcaacactatgggcggatgcagcttatgcgtggcaggttaagctgaacctaatattttcgacacgaagcacacacatgtgaaacttctctgaaacttcttacaaatattgaactctacgcacataatttcaaaagtgtcattaactcagtactaagaaaattaaagattggacctaccgagtttaaatcttttatctgcctacgtgctaactactagtttcttgattaatcacaggggaaatttggagattttgtgaccaaaatggaagcaaatgaagcaggggagtcatttttcacaacaaagctatttggtcaagaaaccaagagaacgtgtgaaagaatttggagatgcttaaagaaagacaaagttacaagcattggtatatatggagttaaaggggttggaaaaacaaccttagccaagctaataaatcatcttctccaacaaaaaactcaataccaagttttttggataaacatttctcaagaaagcagcatcagggaattacaaagtgatattgctgcagcaattggattggatcttttagaggaagaagatgaagagaagagagcgacagcgttacacgactcgttcaaagggaaaaaagattttgttctaatattggatgatgtattggaagatatacctttaaagatgttaggaaatcctttaaaagttgaagggggaaggttgatagtaacaagttgtttgctcgaaacgtgtcgaaaaatgggatgtcaaaggaaatttggagtgaaaaaactagaagaagaagaatcttggagcttttttatagaaaaacttggaaatgagaaagtagtaattcatcaagaagtagaaggaatggcgaagtctgtagtaaatagttgtggtggccttccacttaggataattacaatagctaaaagcctaaaagggttggaattggatggtgttaatcaatggaaaaaggccttggaaaatattattcaagaatctttaaaaggggaaaacaatgatgttatagaaatgttgctatatagttttaattgtttgaaggaacaaaacttacaacaatgtttcttgtattgttgtttgtatccagaagatgagaaaattccaaaggataaattgataagtaggttcattttagagggactaatcgatacaaaagagactcgcgaggcagagtttgaggagggatatgagatattgagcagattggaaagtgtttgtttgttggaaaatgccatagataacaaaggtaatcaatgtgtgaaaatgcacaatttgattagagaaatggcactgaggatcactaatgaaaatcccaagtttatggtaaaagctggagttcaattgaatgatgcaccaaaggaagatgaatggctggaaagtttggacaaggtatttgttagaaactttatacacttgaccttatgtatagacagtcaataattgtatgttatttgttattattaaaaggttttgcctaaactaaaagtaatttgtgaaggtttaaagttgaataggcctaggactcctcataaagcatgaccctttgtgtatagacacactaatgtaatttctaattaaagtatgcgctaaagtagaaataaagaaacagcgcgcaattataaatagggttatgacctccaaatcagacatatcattatgaaattaatacgtcttggtttggaagatcactagaatgaagaaatatattactatggattcaagtatacttctgcatttagtttaattctatatgatttgatatgatagatcttgagggaataatagctttcgtcttctaattttttcctacaggcatcgctaatgaggaacgagatagctgaaattccagcaggaacatcagctaagtgtcctaggctgacaaccttgatgttgcagcagaattatcacttgttgaaaattccagattctttcttcgagcacatgaaggcgttacgtgttcttgatttaggttacacttgcattgagaagttgcctgattctgtatcagacttggaaaatctcactgctctcttgcttgcattttgttggaacctaaggtcaatgccaaccttggaaaaactcgaggctttgcaagaattggacttgagtggcactgggattcagactctgccagtagcccttgagactttgttgaacctcaaatgccttaatttgcatgcaatgcgttggctcgagaaaataccaattgggatattgcctcaaatctcctctctccaatgcctagtgttatcgcatcatatagacgtagaaggtgaggaactagaggagctaaaagagttggaagaatttcaaggtaggttctctaatgttcaagatttcaaccaattcattaatgctcaagaaaatgagggatgtcttaggttttatagaatattagtaggtcaatatgatggtttaggaccaatgacacaaatccaattcaatcataacagattttctgataaattagtcaagtgttatggacttgggaaagaagatgaagtgttattgcttccacaggatattgagcatttgaaaattgagagctgcaataacttcagtggctgtctttcagaacatttgccccgtctttatgattctaaagatttaaagtacttcaaagttcgttggtgcaacaaactggagtacctcatgaggatagaagtgagcgaagaatctgtcatatttcattctctcgagcatcttgatcttcttgaattgcatagttttgttggtatatttgatgactggaaaacaagtttaagagcttcaatttcagtaagtatcttttcttgccttagaatgatacgaatcgagagatgtcacagtatcaagaagctatttccaattggtttatgctcaaacatgcaaaatcttgagagaatatatgtcctctcctgtagtcaaatagaggaaataattgcagatgaaaatgatggaatcgtcgtccttcctacattgacgaggatttacttatggtctttgcctgaattgaaaagcatatgcaatggaaaaatggattgtaactcaatcaagaaagtgtcaataaaggaatgtggtaagttaaggaaattgcctttctttttttcttcccaagaagaagatgagaaatttaccattccttcaactcttaaagaaattgctatacattcaagtgataaagaatggtgggaatctttggaatgggataatccaaacaccagaaatgagcttcagccctttgttaaatattggtaagtattgtgtcttatgttcttgattgagacaactcaataagttaagtaatatttattctgcctatgactccaaatgcttttttcccttttgtcagcttccatagttgaggctgaattcttgttgttgtaattcctgtaacaatgttttgatttgataattcctgctgatttttca

SEQ ID NO: 192 - DNA, 2706 bp, Ocimum basilicum
  source 1..2706: mol_type = genomic DNA
atgtttaggcaaattttggagtcgtttgtatcgaaagctggggagcagatagtagagtatgcacacaacgtgttgaaaagtaaaattgacttggaaacgctgcagtctaatttggactcattaatttctaaggcaactgatgtcgaggagagaatcaagaaaggagaggtatcaggtcagaagaaaaggaaaagagaagttgaggattggttgagacaagtgaaatccattgaagctcaagttattgagttagagactcgagccgaatcagcaggatttgttcgcaagttcttagctggaggaaaagcaacgcgaatgaatgaagaagttggtaagcttgttgagcaaagtcgacagtttggcgaacttctaactgatgtttgtggaaccaggggagatacattattgactgccaggatgtttggtggagcattttgtaaaaatttggaaaatattttgtcacttctgcagactcgaagagtgtcgagcattggcattcatggtatgggtggtgtgggcaaaactacgctggcaaagaacattaacaaccgtctcctagaaaaatccgaaggaggtgtgttttgggttacagtgtctcaagaattcagtgtaaagaatttacaggacaaaatagctcgttatctaaatatagaacttttggatgaggatgatgaaggcgtaagagccgcacgattgcatggagttttatcgaagcagaagaattttgtactaatattagatgatgtgtgggaatgcattgatatggcaaagctgggatataacttgtctggggagtgctgcaggctgattataacgactcgtttgttaaaggtatgccatcaaatgtgttgccaagatatagttgcagtgcaaaaactaaaagaggatgaggcttggaacttattcgctgaaacactcacttggaggaaaggagcaaacctagatcctcaagtagaagaagttgcaaaatctgtagtaaaattgtgtgatggtctgcccctaggaattattaccctgggtggaagcatgagaggcgagacgaacatccacacatggagaaatgctttagcagaactgagggaatatgttagggggcaagacagcatgggagaagatgtttttgaggtactgaaatatagtttcgaccgcttgaaaactaaccaccagcatcgaggtaatggatttaatttgtttcagctttgcttcctgtattgttcgttataccctgaagaccaggagatacatagaggccaagtgataagaagattcatttcagatgggttgatggataaaagagagagcaggagggcacaagttgacctaggccattacatattggataaattagtgaatgcttccttgttggaaagttgtgttgattattttggttatgagtgtgtgaagatgcatgatcttgtaagaggaatggcattgagaatcagacgaggcaagtacatggtaagagctggggagaagtctttgaaggaaatccccaaggagtggagaaagcatgttgagaaggtgtctttaatgaataatggcataaccacaattccaaatggaatatcccccatttgtcctaaactgtcaaccttgctcttacaaggtaatcctttagaggtaatcccagattcatttttctctaacatgcatttcctacgcacccttgatttatgcaacactcatatcacgattcttccaaactctatatccgtcttgacgagcctcaaggcattgctcctcgagggctgtggtatgcttcaatatgtgccgtatttggggaatctgaaagcattgaaggagttgaacctctcaggtacatcaatccagaaagtgcctcaaggagttgaggaattactcaatctcaaattcctctcaatagatgcacctttactagagatgctacctagacgattgctgctcgaattaggacaacttcaatacgtgaaatttccatttcatctacaagtagtgatggaagaagttgagaatcttagagagctggaggagttctggggaactgtcaaagatgtgtgtgattttaatcggtttataagaagcaggcaaagtcgggtgcatgacactctctacaatattcaggttggaggtacttatgtagaagatttcaggtatgattacaaacagttggtcttgttcaaatacgaccttaaagataggaaggatcaccatctcaagtttcgagtgttgaatatattggtgctggttgaactggaggggttgaagggggtggtggagaaatgggacataggagcatcagcactaggtgtgttttcctctcttagattgctacacattgaaaattgcagcaagatgaggaagttggggctgccagtatcgggttttccaaagcttgaagtgattacaatcgagttgtgtggagagttggaaacgatattcgaagatgaagggagagggtgtgtcaccctccccgaactaaaagagttaaacttgcgttgtctgtcgagactaaagagtgtatgcaaggcgacattagtctgcgagtctataaaggaaatagggattgagaagtgcccaagattaatgaagaagctgcctctgtttcttgcatgggatacaccatccacacttaaaagtataagggtggagaaacaatggtgggattcagtggagtgggataatcccaatcaccaacacctcctccagcccttcctcaaattattctga

SEQ ID NO: 193 - DNA, 2982 bp, Phaseolus vulgaris
  source 1..2982: mol_type = genomic DNA
atggccactagaatcatagaaggcttggtgaaaacccgtgaaatatatactctaatcttggatatgctctgcggattcaacggcttcaatgacaatgtacaaatgctcgaaatgaagctagaagagctttgcagcctggaacatgacataaacaaagagctagaaattgaagagctagagcatggcaagaaaaggaaacgagaagttgaaaattggttgagaaatgttcacagaaagaaaaatgaagtgtatggcaaggttcaggatttgagatacggtggagtgtttaggaatttcaagctaattgtacaagtaaagaaactaacaggacaagttacagatcttgtggggcgtggtaggttccctgaaggaattgtgggcagtgcacaggaatctagaggatatgcattgttgacaacagaattagctggtgcaatgtttcagaaaaatgttcgtaagatatgggactggttgatgaacgatggtgtgttgatgattggtgtgtatggcatgggaggagtggggaaaacaagtgtgctaatacacatacataatatgcttttaacagcggtcaccaactttgaaagtgtgttttgggtgactatctcacagtcatttagcattcacaaattgcagtgtgatgtggcaaaaatagttggcatagatatttcaaaagaaagtgatgaaaggaaaagagcagcaagattatcatgggccttgatgagaaggaagagatgtgttctttttctagatgatgtgtggaatcattttcctctagagagggttggaattcctgtgagagcagatgggctaaaattggttttgacaagtcgttcgttagacgtgtgtcgaaggatgaattgtcaaaacagtgtcaaagttgagcctctttctatggaagaagcatggactttatttgtggacaaccttggacaacagactactttttctccagaagtagaacaggttgccagatctgttgcaaagcaatgtgctggtttacccctagcaattattacaatggccagaagcatgaggggagtggaagaaatttgtgagtggcggcacacactggaagaactaagaaacacaaaagtaaagccgaaggaaatggaaatggaggtgctcggtgtgttgagatttagctatgatcacttgaatgataaaatggtccagcagtgcttcttatgctgtgcattatatcctgaagattttgaaatagacagggatgttttgatagaaagttttgttgatgagggactggtgaatggaatgaaaagtttggaggctacgtttaatgaaggacacaccatactgaataagcttgagaacatctgtcttttggggaaagtggaaaattatgttggtggaaagaaatgcacaggactacaggatgccagcagtcatatagctatcagcatgatgaaaatgggatgccaacatgtggaaccaatagatagtgtggaaggctactatgtgggaagtcaattggtgaaaatgcatgatttggtgagagcaatggctattaatgttataaaggtgaacaaccatttcctggtgaaggctggattgcaattgacaaagattcctgatgaagtagaatggactgaggacctagagaaggtttccttgatgtgtaattggatacatgaaattccaacagacatatcacctaggtgtcctaaacttagaaccttgattttgaagcataatgaatccttgactaggatctctgattcgttttttgtgcacatgtctgctcttgaagttcttgatttgtctttcacagacattgaggttttgccaaaatctgtgtctgagttgagtaccctcactgctttgttgctaacatcttgtaagcgattaaagcacatgccttcactagcaaagcttcagtccttactaaggttagacctatcttttactgcaatcacagaaatgcctcaaggtttgcaaacgttagtaaaccttaaatggcttaatctttatgcaaaagatttggtgtcatcaggaaaacaaatagcaaaattgactcgtctccaatttcttattctccattggtggtcaagaaagataaaagtgaaagtagagtatatatcatgcctgagaaagttggaaacttttgcagctaacttgtacaacatgcaccatttcaatgcctatgtgaaaataatgcatatatatggacctagaagttaccttcttcagttagacactgaagaatctcttggtaactctccgtggtgttgttttgctgaggtttgtttgaggaaggatgtgataatttcaaattgcaaaatcagaacaggagaaacgccccttatcctccctctagacattcaacgcttgaaggttgaaagatgtcatgacattcagagcttatgtgatgttatgtcattaaaaaacgccacctcttttaggcgctgtgagattgcagactgtgatggacaagagtacatgttttctttatcttgctcttcctcatgttgcacctctcttcacagcttagaatcattggaactctatagcctgaaaaacttgcttagtctatgtaaggaagatgaagttgtggctcaaatctttccaccaggaagagcttttacttgtttgaagtactttttcatctaccgttgtccaattatcaagaagcttctgacacctagattgctagcttatctaccaaacatggaagagataactgttcataactgcaagtcaatggaagaaataatttcagttgatggaacagattatgaaagctatgggggtaaaaaatcttatgtgactaatagagatactattatagtcacacattcaaagttaatgtcattatcattgaagcacctaccagaactcaggagcataagtagtggacaaatgttgtgcgagtctctccaaaacattaggatctttaaatgtccaaaactagcgaggctcccagaaaccgctaccccagttcagattttgtacgattccttctaa

SEQ ID NO: 194 - DNA, 14022 bp, Solanum tuberosum
  source 1..14022: mol_type = genomic DNA
  misc_feature 2660..6876: note = n is a, c, g, or t
gacttccattgcctgggcaaaattatcttttttcatagaaaaagaagataaggagcctccccctcaagaacaccagagaaatcaaagtggttagtattcaaattctgtctatcttttttcattgtaagttagtgaatattttgatgtctatttgtatacatgaatatctgtcaaaatttctgtgatgaaatgtaattctatatcaattgatagtgtgaggaatgtttattatacctactccatattttttctttgttaccaactatactcggaatagacaaaggcggagtcagaattttttgtttatcatcagttcgacaattatatatggtgcagttgccttagaccttagtagtgccttcactttaccagagtgttattcttttattgttgccattgctctgcttgaaccttgaggacaaggttcttattgaggaggggagtattgttgtgaacacaaatagcccagaggctagacaagttgttaggcctggggctaaaccacgaagaggcctaagaataagacatcccaataatagatttgctcgggatccaggttgagtagagataaaagggttgtcactgcgatttggagaattcatgcatattgaagagacaatgtctatcctctcttcttcttctagagtcaaagcttctcatcctcatactcatctctatcgtagttgttatttcagtacttttcggttgtaattcaatagtttaagtgttgctgtgataatttgattatcaagcattacataatatttgaatatttgctgttgagaattcgggttcgttacacagtctgaatctattgattatcacttccaggagttggtaataaatgtttgctctggatcctttgatcaccacatctcctatagtatacagggcctagatttgttgctttataagaagatagaaagtgagaatgaattgactagctaactgatcctaacagaatgaacagaattgtaactaactgatgtatccattcctgactagtttaaccaactgtgtaatttcccaatctcgtgtatcagccttcccagaaggggtggaggcgtgttagagtccgacaatatctgggatatgagttgtagtctcttggtcttgaacattcttcacctcataatttagctcttaggcttgaattggattcaatatcatttacttagatatcagctttgatgagcctctcattgttgcttttgtttttctttatcttttccttctgttgctttgcagacatacttgtcatgaaaatcgttggtgcagtagttagcatgatgcagtgtttttgtggagagacctgctctcgtcatacctgagaaggcctggtgtattagcaaaagatggggttccttaaagctcgagaggaagatagaaaaaggaaaatgtatggcgtggtatgcagaggtccaatgatttgtgattccttgacgactatagaagtcgtagattgtccagatctggaaatacttcccttctttttggaaataaggcagcaactagctgactctctcaaacagataaaaggaagcagaggatggtggcggacgttaaagaggaagcatcctaccgcgacgtcccttcttgctccactccttagacccgaaagggagtattcttctgctgcagtgtgttgattacaattttatgttacagacttatttcccactacagtgtgatgttttcgagtttgagttcatttcctttccaggactctcaaccacatcatcgatcattaggccacactattagatgcccaaaaatagtgcatttttggaatccaacaataagggtgtgacaacaattttaaaaagtccgagcaacatagagttctacaacatattgaattgtactgtcatgatgtttaacagttcatgatggaatattttcctcacattcaatactttttccccatttggcaaggaatgtattgctgagaatttaattgaatcttgtcctatcccacactattagatgcccaaaaatagtgcatttttggaatccaacaataagagtgtgacaacaattttaaaaagtccgagcaacagagttctacagaatattgaactgtactgtcatgatgtttaacagttcatgatggaatattttcctcacattcaatactttttccccatttggcaaggaatgtattttatgggaatttaattggatcttgtcctatccgactcaaccccgaaacttagaactaggagggtagaatggggagaaggggagaaggggagtcgtgcccgttctctattcggacacatgtaaaaacataaaaagttaaaataaaatggaaaagcgaatacatgtataatataacgacatattcaaaaatatgtgatcctatttgataggatgcccataaagaaaagatatcgaccacataactatttatatttgtgtgtagcttaggtctccctataaattatacagtgattcattatttaagaaaagacttcaggtgtgtttggtctaaaggaaaacattttccggaaaatgttttccaattttcctttttttagcccagccctattaaatcccggattaggccagatctttcaagaaagacagagttgcttgaattggtgcactctgatttatgcggtccaatgaagacaaagacattgggtggtgcactctannnnnnnnnnnnnnnnnnnnnnnnnnnnnnnnnnnnnnnnnnnnnnnnnnnnnnnnnnnnnnnnnnnnnnnnnnnnnnnnnnnnnnnnnnnnnnnnnnnnnnnnnnnnnnnnnnnnnnnnnnnnnnnnnnnnnnnnnnnnnnnnnnnnnnnnnnnnnnnnnnnnnnnnnnnnnnnnnnnnnnnnnnnnnnnnnnnnnnnnnnnnnnnnnnnnnnnnnnnnnnnnnnnnnnnnnnnnnnnnnnnnnnnnnnnnnnnnnnnnnnnnnnnnnnnnnnnnnnnnnnnnnnnnnnnnnnnnnnnnnnnnnnnnnnnnnnnnnnnnnnnnnnnnnnnnnnnnnnnnnnnnnnnnnnnnnnnnnnnnnnnnnnnnnnnnnnnnnnnnnnnnnnnnnnnnnnnnnnnnnnnnnnnnnnnnnnnnnnnnnnnnnnnnnnnnnnnnnnnnnnnnnnnnnnnnnnnnnnnnnnnnnnnnnnnnnnnnnnnnnnnnnnnnnnnnnnnnnnnnnnnnnnnnnnnnnnnnnnnnnnnnnnnnnnnnnnnnnnnnnnnnnnnnnnnnnnnnnnnnnnnnnnnnnnnnnnnnnnnnnnnnnnnnnnnnnnnnnnnnnnnnnnnnnnnnnnnnnnnnnnnnnnnnnnnnnnnnnnnnnnnnnnnnnnnnnnnnnnnnnnnnnnnnnnnnnnnnnnnnnnnnnnnnnnnnnnnnnnnnnnnnnnnnnnnnnnnnnnnnnnnnnnnnnnnnnnnnnnnnnnnnnnnnnnnnnnnnnnnnnnnnnnnnnnnnnnnnnnnnnnnnnnnnnnnnnnnnnnnnnnnnnnnnnnnnnnnnnnnnnnnnnnnnnnnnnnnnnnnnnnnnnnnnnnnnnnnnnnnnnnnnnnnnnnnnnnnnnnnnnnnnnnnnnnnnnnnnnnnnnnnnnnnnnnnnnnnnnnnnnnnnnnnnnnnnnnnnnnnnnnnnnnnnnnnnnnnnnnnnnnnnnnnnnnnnnnnnnnnnnnnnnnnnnnnnnnnnnnnnnnnnnnnnnnnnnnnnnnnnnnnnnnnnnnnnnnnnnnnnnnnnnnnnnnnnnnnnnnnnnnnnnnnnnnnnnnnnnnnnnnnnnnnnnnnnnnnnnnnnnnnnnnnnnnnnnnnnnnnnnnnnnnnnnnnnnnnnnnnnnnnnnnnnnnnnnnnnnnnnnnnnnnnnnnnnnnnnnnnnnnnnnnnnnnnnnnnnnnnnnnnnnnnnnnnnnnnnnnnnnnnnnnnnnnnnnnnnnnnnnnnnnnnnnnnnnnnnnnnnnnnnnnnnnnnnnnnnnnnnnnnnnnnnnnnnnnnnnnnnnnnnnnnnnnnnnnnnnnnnnnnnnnnnnnnnnnnnnnnnnnnnnnnnnnnnnnnnnnnnnnnnnnnnnnnnnnnnnnnnnnnnnnnnnnnnnnnnnnnnnnnnnnnnnnnnnnnnnnnnnnnnnnnnnnnnnnnnnnnnnnnnnnnnnnnnnnnnnnnnnnnnnnnnnnnnnnnnnnnnnnnnnnnnnnnnnnnnnnnnnnnnnnnnnnnnnnnnnnnnnnnnnnnnnnnnnnnnnnnnnnnnnnnnnnnnnnnnnnnnnnnnnnnnnnnnnnnnnnnnnnnnnnnnnnnnnnnnnnnnnnnnnnnnnnnnnnnnnnnnnnnnnnnnnnnnnnnnnnnnnnnnnnnnnnnnnnnnnnnnnnnnnnnnnnnnnnnnnnnnnnnnnnnnnnnnnnnnnnnnnnnnnnnnnnnnnnnnnnnnnnnnnnnnnnnnnnnnnnnnnnnnnnnnnnnnnnnnnnnnnnnnnnnnnnnnnnnnnnnnnnnnnnnnnnnnnnnnnnnnnnnnnnnnnnnnnnnnnnnnnnnnnnnnnnnnnnnnnnnnnnnnnnnnnnnnnnnnnnnnnnnnnnnnnnnnnnnnnnnnnnnnnnnnnnnnnnnnnnnnnnnnnnnnnnnnnnnnnnnnnnnnnnnnnnnnnnnnnnnnnnnnnnnnnnnnnnnnnnnnnnnnnnnnnnnnnnnnnnnnnnnnnnnnnnnnnnnnnnnnnnnnnnnnnnnnnnnnnnnnnnnnnnnnnnnnnnnnnnnnnnnnnnnnnnnnnnnnnnnnnnnnnnnnnnnnnnnnnnnnnnnnnnnnnnnnnnnnnnnnnnnnnnnnnnnnnnnnnnnnnnnnnnnnnnnnnnnnnnnnnnnnnnnnnnnnnnnnnnnnnnnnnnnnnnnnnnnnnnnnnnnnnnnnnnnnnnnnnnnnnnnnnnnnnnnnnnnnnnnnnnnnnnnnnnnnnnnnnnnnnnnnnnnnnnnnnnnnnnnnnnnnnnnnnnnnnnnnnnnnnnnnnnnnnnnnnnnnnnnnnnnnnnnnnnnnnnnnnnnnnnnnnnnnnnnnnnnnnnnnnnnnnnnnnnnnnnnnnnnnnnnnnnnnnnnnnnnnnnnnnnnnnnnnnnnnnnnnnnnnnnnnnnnnnnnnnnnnnnnnnnnnnnnnnnnnnnnnnnnnnnnnnnnnnnnnnnnnnnnnnnnnnnnnnnnnnnnnnnnnnnnnnnnnnnnnnnnnnnnnnnnnnnnnnnnnnnnnnnnnnnnnnnnnnnnnnnnnnnnnnnnnnnnnnnnnnnnnnnnnnnnnnnnnnnnnnnnnnnnnnnnnnnnnnnnnnnnnnnnnnnnnnnnnnnnnnnnnnnnnnnnnnnnnnnnnnnnnnnnnnnnnnnnnnnnnnnnnnnnnnnnnnnnnnnnnnnnnnnnnnnnnnnnnnnnnnnnnnnnnnnnnnnnnnnnnnnnnnnnnnnnnnnnnnnnnnnnnnnnnnnnnnnnnnnnnnnnnnnnnnnnnnnnnnnnnnnnnnnnnnnnnnnnnnnnnnnnnnnnnnnnnnnnnnnnnnnnnnnnnnnnnnnnnnnnnnnnnnnnnnnnnnnnnnnnnnnnnnnnnnnnnnnnnnnnnnnnnnnnnnnnnnnnnnnnnnnnnnnnnnnnnnnnnnnnnnnnnnnnnnnnnnnnnnnnnnnnnnnnnnnnnnnnnnnnnnnnnnnnnnnnnnnnnnnnnnnnnnnnnnnnnnnnnnnnnnnnnnnnnnnnnnnnnnnnnnnnnnnnnnnnnnnnnnnnnnnnnnnnnnnnnnnnnnnnnnnnnnnnnnnnnnnnnnnnnnnnnnnnnnnnnnnnnnnnnnnnnnnnnnnnnnnnnnnnnnnnnnnnnnnnnnnnnnnnnnnnnnnnnnnnnnnnnnnnnnnnnnnnnnnnnnnnnnnnnnnnnnnnnnnnnnnnnnnnnnnnnnnnnnnnnnnnnnnnnnnnnnnnnnnnnnnnnnnnnnnnnnnnnnnnnnnnnnnnnnnnnnnnnnnnnnnnnnnnnnnnnnnnnnnnnnnnnnnnnnnnnnnnnnnnnnnnnnnnnnnnnnnnnnnnnnnnnnnnnnnnnnnnnnnnnnnnnnnnnnnnnnnnnnnnnnnnnnnnnnnnnnnnnnnnnnnnnnnnnnnnnnnnnnnnnnnnnnnnnnnnnnnnnnnnnnnnnnnnnnnnnnnnnnnnnnnnnnnnnnnnnnnnnnnnnnnnnnnnnnnnnnnnnnnnnnnnnnnnnnnnnnnnnnnnnnnnnnnnnnnnnnnnnnnnnnnnnnnnnnnnnnnnnnnnnnnnnnnnnnnnnnnnnnnnnnnnnnnnnnnnnnnnnnnnnnnnnnnnnnnnnnnnnnnnnnnnnnnnnnnnnnnnnnnnnnnnnnnnnnnnnnnnnnnnnnnnnnnnnnnnnnnnnnnnnnnnnnnnnnnnnnnnnnnnnnnnnnnnnnnnnnnnnnnnnnnnnnnnnnnnnnnnnnnnnnnnnnnnnnnnnnnnnnnnnnnnnnnnnnnnnnnnnnnnnnnnnnnnnnnnnnnnnnnnnnnnnnnnnnnnnnnnnnnnnnnnnnnnnnnnnnnnnnnnnnnnnnnnnnnnnnnnnnnnnnnnnnnnnnnnnnnnnnnnnnnnnnnnnnnnnnnnnnnnnnnnnnnnnnnnnnnnnnnnnnnnnnnnnnnnnnnnnnnnnnnnnnnnnnnnnnnnnnnnnnnnnnnnnnnnnnnnnnnnnnnnnnnnnnnnnnnnnnnnnnnnnnnnnnnnnnnnnnnnnnnnnnnnnnnnnnnnnnnnnnnnnnnnnnnnnnnnnnnnnnnnnnnnnnnnnnnnnnnnnnnnnnnnnnnnnnnnnnnnnnnnnnnnnnnnnnnnnnnnnnnnnnnnnnnnnnnnnnnnnnnnnnnnnnnnnnnnnnnnnnnnnnnnnnnnnnnnnnnnnnnnnnnnnnnnnnnnnnnnnnnnnnnnnnnnnnnnnnnnnnnnnnnnnnnnnngtagcaacaagtgtttggacattttcatggtggatgcaacttctatacttagtgatttcctaaaaaactttaaatagattttgagtttggatctctttaattttaaattttaatattatattatattttttaattaatttgtattagcccacgggccggccctacctatatttctcaagccccacaaatcagcaggcttattcaggccaggctaaaaagccctttttttaaatgggctccaatttttttagcccagccctattaaatcccggattaggccaggccggcccaacaggcctagcccatattgacggctctatgttcatccaagtgacaatgtcacgatgaaaccatatatatggattattatggtacactctttagactttatcatcctagtattaacctatgatatttggtaatgttttatattagtgttacatatagttgaaacaatatttttgctttaagaccgctagattaaaggttaattaatgtatttgacatattttaaatttaacatcacaaaggtctcgactttaaatcctaaaaattgaaaagaaaatctattagtagtgtctgtttattcgagcacctatttagataccaaacacgtaatgtgaaaccaaaaaagaattcagcagcaatttggagattgtgtggggcaggaaaatcacagatgaagcttctacttatatacaataaatatgaagattgacttcaagtcaactcgtagatggccttagactttcattgcctcaatacattacatggcaaaattatcttcattgtatagtattcacactcatcaatcatattgataatttccttgtgatattttttcattaaaaaagaagaagataaggagcctctcaatcaaagtggttagtattcaaattctgtccatcttttttcatagtaagttaatgaatattttgatgtgtataatgtatacatgaatatctgttaaatattctgtgatgaaatgtagttcgatatcaattgatagtgtgaggaatgtttatacctactccctattttttctttgttaccaactatactcggaataaacaaaggcggagtcagtattttttgtttatcaattagacaatttatggtgcaggtattgcatcccacaatagttgaggatgaatgaaattatgataagttccagtatcaactacaatgtgtaatggtcttttagagttgtaaatctcatgtgaaccatttagagcatgaataggtatctccatctcctccatagatgtgtccaattccatcttgctcctccaaaacttgctcaatttgaatctctaaatctagaagatagagcacgtttcagattcttacgtttgtggccctgtacatactttgaaccttttctcatttatctcctccaaacttagcctccttctgttgatatactctgatggagggtatggtaattcacagggtttttcatcatgaatggactgtctctccctggaagtttcagttccattctccatgggagtaaaatcactccgagttccttctaatttctcttccaactctatcacggtttcatccaatattttcagagtagtaacttcaccatttacaactccaatttctgtaatcaatttctgcatcatctcacacaaatcacctcctttagtcattgaatcactagcactttctccattttcccttgttcatttcgccattgatgccgagaatcacccagctctgataccaatgatagctgacattcagaaattacagatgaagaattcatagtctgtgcaggaaagttacaaagactttcaagtatgatcagccaattcaagtagaagaagaagaagagagcatagaaagtgagaatgaattgactagctaactgatcctaacagaatgaacagaattgtaactgtcctaactaactgttgtatccattcctgactagtttaaccaactgtgtaatttcccaatctcgtgtatcagagttcccggaaggggtggaggcgtgttagagtccgactttatctgggatatgattgtagtctcttggtcttgaatattcttcatctcataatttagctcttaggcttgaattggattcaatatcttttacttagatgagcctttcattgttgcttttgtttttctttatcttttccttctgttgtttcgcagacatacttgccatggaaattgttggtgcagtggttagcatgatgcagtgtttttgtggagagaactgttctcgtcaatccgtttctgaaacatgtacatacctgagaaggcctcgtgcattagcaaatagacttaatgaaaagatggaattgcttaaagctcgggaggaggatataaaaaggaagttacatgtggaaaatgtaaggcgtggtatggagccaaaggctgaggtaaacatgtggcttatcaatgtaagaaagattacaacttcacaagtagtattaccagcatgcaagagaaacttactgtagacaagaggtgtttaaacagatgtttgccaaattatatgtctcgatttaagcaggggaaacacatcaataagaaaattaaagaagttgacaggctcctgggacagagcttatttccagatgctttgttggttgatatgatgcctcggaggggaaagatattgccagcatcctcattagtaggagaatctgctcaaagaagtttggagactgtatgggagtatttgaatgatgaacactctgggataattggtatttatggaatggggggtgtgggtaagacatccatcctcgtagaaatcaataatcgtattttgagagagagcacaatttttgataatgtcatttgggtcacagcatccaacgattcaaatgtccagaaattgcagaaggatattgctagagcaataggtttatcttttgacgatgaagatgatgaaatgacaagagcagctcaattacttgaagcgttgatgcgaagaagtagatttgttttaattatagatgatttgtgggaagcatttcctttggaggttataggaatcccatacccatattatggatatgactgcaagttgataataactactagatccatgatagtttgtcgtggcatggaatcagtgagggaagttgaagttagtgttctttcagaggaagaagcatggaacctctttaaacaaaaggtcggtgaggaggtgctagcatctccaacattacaagctgttgccaaggatgtgtcgaaggagtgtggaggtctcccactagctgttgtaacagttggtcgggctttaagaagagaaaatgatctgaggcaatggaaaaatgcattaagccagctgaaaagtgcaacgggaagaatagaaggcatggagaatcgagtctttgcacgtctgagatttagctatgaaagactgaaggacaatgtgactcgttcatgttttctttattgcacattgtacccagaggatcatcatatcgagaccgaagaactgattaagtactggacatgggaaggcctgttggataatcttgggtacggagaatccaagatgctgcagggaaagatgatattagatgaactgaaacatgcgtgccttctagagatcattggatgtcaagaaggtagtttgaatgaatatgtcaagatgcatgacctcattagggatatggcaatagctgttacaagagagagcccactctttatgatccgagcaggacatgagatgcgtgtcccaccagttgagagtgaatggctcatagggcttgaaagaatctcgttaatgagaaatgatttgaactctttgaatttggaaccgagatgtcctcagttaaccaccttgctattgcagtataattcactgaccaagggagtacatccttctttctttaaccatctaaaaagtctcaaagttctggacttatcttacacgggcatctctgggttgcctgattcactttctaatctcgaaaaccttcatgctttgcttctacgaagttgttggaacttgcatcacgtgccaacaatggaaaggctaaaggagctgagggttttagatctctcttctacatcgattgagtgtgcgcccccggggatggaaatgttactcaatttgaagcatctggatctctcccacactacacttcatgaatttgatattcaaattttaggaacatacagatttctggagagtctcttaactattggtctatggcaacctctaatgctcggtccagattttgttgatgttgtgaaacgctgcaccatcttgacaacccttgaagccaatttcagcaacttgcaggacttcaactattatgcctcatcagatcactggaacacacttgagagtttcaaattttgtgtaggctatccccaatcctctaaactacccggaaaaaatagcgtaggattctttgggactcacattgttgaaacagaagcctcttcttggttgccaggtatacttgagttggtcattcatgaatgttctggaatcactcacttacctatgtttattgtgaacgcttcctccgacctgaaacgttgcaaaataaagtactgtgatgagatggagtggattataactcccgagtggggcacatttcctaatttagagttgctagagattgagggcctgagcagactgcagaatatatgtaaggggattccaccaacaggcactctttcaaaccttaaggtgttgaatgttattgcttgtgataatctcatgactctgttaccacttgagttagtgcagcatctcaaaaacctcgaagagctcgagttggaacactgttcgatgctggaggagatcatagtcactgaagcggaaaatgaagagatcattcaagagaacaacggtgaagtggtcctcccaagtttgcaaaaattaagattagtttctataccaagactgagaagcatatgcagaggtccaatgatttgtgattcgttaacgactatagaagtcgtagattgtccagagctggaaatacttcccttctttttggaaacaaggcagcaactagctgactttctcaaacagataaaaggaagcagaagttggtggtggaggttaaagaggaagcatcctaccgcgacatcccttcttgctccactccttagacccgaaagggagtattcttttgctgctgatgaacatagttacattctcagctctggaaattcttctttgggccacgataacattcttacagtaagtaacatgcttgcgcttttaaaagactttttaaactgttagctaatcaacattgatttgaaatcacaacttcggatttttcagatcatatgtttttcttcaacaataaagagaatagatgtagagagttgattgagtaggcaaaatatctgaaaaatcgtattatgcacaatgactatttctggcaggaatcccaaaatacgcatagtaatagaaagatttatcccttgttttgattacagttttatggtcccgacttatttcctactgcagtgtgatggtcttgagtttgggcctttgccaaaagatgactttgtttccttctcataatcatgcattttctctatcttttagttatagagcagtactacctatattgctcaactcttaaaaaatgttgacgggaaattctccaaaagtagagcatttttggaatccaacatgggtgcagtaacaattttggaaagtctgagcaacatcaagtaccacagcctatatcgtattgaactgtactgtcttgttcaacagttcatgaatgagacgcagtagttgttctttgtgtcattctcttgtttaacaggcttaaactacagattgtcatattagattcaactaatttttccattttaatcaggtggaagtggaggtcgggctcatattgaaaatcctgtatcccatttgtctttgctgtatagtggctgcttcgcggataagaacatgaagtataacaaagttcgagtgttggagtgctaaaaattatctagtctgtgaaagtatcagcaaagattcttgctggggaatgctatatgaaactgtcatatgaaatcactatagaagtttggcatattaagtaacaaataaagagagatttgaggttccatatgacgtctcaaacgctagaaaagctgtccatgaaaacgggattaatgtgtgatgaagcttcgtttatgtttgaacatcctgaaatgctcttttgtatcccattcaaatacttctttttagcttacacaaaaccatagtttgtttgttgtatgcacagttctgatgaatcagtccgaattaatagacttcattttcatgtatatttcaattatcatttcaggagaaaaatcagtaaaaataccttttctctatgtccacaccttcttcggatgccagtgtctcaatgtggttcttgacacgatcagctccagtttggtttggctccagtggaatgcaagcagtcttgattgagtcctcaccatgaaagttgagacaggcctagagtttgcacatcgggtaggtcccctcctggggcagtacttggttaaccatgtaatgttgtacgtggttaaccaaggtagagcttcaatcatcactatatctatggctcaagagaccacttctagaccttcatcaggtttcactggaacatgctctggttgggcctatcctgcccactggatgcccctgaaattggggcagtatttgcccagctcccgcctgattgtctcccgagccttactggtcgggggagctgcagcatatagataaaaaggtactgttttcatttacattgttgtgcttatcatttgtaagaaatcaatgtcatattgagtagtagcaaatttttccgtcctgttttcagtttcagctgcaactttttgcttgttttttttttacgtagtcaagtcagattcatcaagtttaagcctgcaccagtgaatgaatgacaatgttgtctttgacaccaaggcgaggatgagcaccatcatgctgctgatcatgagaaacatatttatgtaatcgtcgtgatcctgaaatatgttcacaatgatattgaattttgcagttcgtgtgattcagataatgtagattttgcaccatagcaacaattatattgattgtagtacaatgttctttttgtccttgatcctatgatcgatacaggatatagacta

SEQ ID NO: 195 - DNA, 9008 bp, Vitis vinifera
  source 1..9008: mol_type = genomic DNA
ccattggtatgatttccataagataactctttagttctttgggagatatatatatatagaactagtccttcaattcatctccttcactcaaaacttcgtttcctctatccattcatctaagatcaaggttagctttattttcattttatttctatattatttttggtttataacttccatcgggtcgattaatttgtactatatgcatttgatttggggttggccttcaaaaatcattgaatgttgttgtgtttgaatcatccatgtgttttgcattctcttataggtttggtttggcttgatttggtctaaaataataatgaccatattttcgtattattttcattagattgttatttgttttgtttgatttattcattcatataagcatttaagcaactaatctgatagcaaattttcaaatgttcaaccaagtcttaaaatgcatgcaaattagtacaacctataaactatagctaggcataatctcatgtatagaatatgtagtgtggccttgtataagtagctgcatgattttcgacctttgttccctatctcttcttatatgcatataacccattctttaatattgcaggaaacagacaattcgactccttcaatacttcacctcaagcttatttccttctatttatcaacttgaggtcagatttattttcatttaatcaatatatttgttgctttaaatgttctttcttaattgtttaaatcgtatggtatgtttttgtttgagtttaacctttaggaatgattgaatattatctacaactataatggatataaagctttctttctctctaaatttgaatgcatattttattagctcccaccatatgtaattcacttcttcttcctttttattttttatttttatgagtagcttgcacataattaagtgcaacggtgtatattaattaattattcaaccctatgtttagttaaatatcatggaacaattaattaatgtggaatattttgactattagactatgtttggtttctaaaaaatttgagaaaaaatgcaaagtaaagaaaatggaaagaaaaagtaagaggaaagaaaaataaaaaaataagtttaaatttaataaatcgtctttttacttttcttcaaacttattttatttatttcactctctattatagcgagattaaatgatttaaaaatatataaatttttaattaatcttaattatatttgattttttttatatttctttttttgtgaaatcaaatatgaaaaaactattttcctttaataatttctttccttgtctagtgtttttggggaaacaaacatagccaaaatttataacattgccatcaatcaactaaatggctctttggagtaattgtataccttatcatcaaatttagacctagtaaattccaacttgtctagaaaatcatcagaattcaaattttaaggtatagtcaaattggtcaaaaaggttggaggaaagttggaaggctatgaattgggatgggggagctagaagagtttaaaaaaaattaggtgatcattaaaattttaaaaaacattttaaaagtttagaaatcacttaaagtgactcattgataacatttagagtattttttttacctatcaagtctatttttaacaaatattacaaatgatttttcaagtctttaaaagtgctttataaatcttatcaaatacataatttttcttttagagcattttttatgctagaattattttttaaaagtattgtcaaatagactttcaaaatattctttttggaagaatcattttttaattatatattttaatattattaaaaatagtttcaaaatattttttcttttactttattttcaaaataaaaatatttttgatagagatgcaaacaatagaaatgttataaacttaaagtgtttttttttaagagaatcacctcaaatggaaccttagtcttttgtttctttggggctttataaatacatcaacctaaatttggctccagtcttaaatacatcatgttaccatacatacaagtcacaagactcacaacatagtaaatgttttaaggtacacatgtattatttgaatctattaaatgatgaatttaatcattttcattagttttgcaatatttcaataaatattttagaatctatatagatgatgcaaacaacactagtaaaaaagaaaatagtaggaagaaattccactttctcatttttggtttacctttaaaaaaaatacaaaaataaatataataaaaattatttaaaaagattttaaattcttcatattagacagaaaaaaaaggaacaaaattaaacaagtatgtgagaaaactttttaaatttatatcgattttctatttttctatttttattcttttattttatttttttcttcttcatttcttttcctgttcactctctatcaaactttcaaaggtccaaatagtttgaatgtcaaaattgaagaatttgttttttttttttccaaaagtacaagagctaaaacccagaatatttgtcccattatctcgagtttttaatgaaagtataatatttttaccaaaattttgtgatgattttgtgagctatcattctaggaacctttcatttccaaaaactttaaagttatgtttggttcttagaaaatttaaagaaaaacaaaaaagaaaaaaaaagagaagaagagtagagaaaaagaaaaagtgaaagaaatattaaaaactaattaaaaattattaaattatttttatatgttacttcaatcttatttgacttatttttcctattatatgtaaagattaaaataaatatttaattaatatttattatatttgattttcttttatattttcactagtaaaactaaatataagaaaatttttcttaactttttttttttctttaatactttcccaaagtcaaacatatatcctaactttctcaaaaacttctatttctttgaacatattggtacacttaattgttattataattatccaactttactctaccaattgcttatagttttgaaagtatatttttaataataaatttattggagtaaaaaagtttttataattttcttacgaaatgaataagatcttaaaaaaagaaacaacaaaaatagcttgttagattaattcatatttatgttatataaatcaagaagctaaaacttagattttgtttgggaagtgcttttaaaaatagattttgagaataatgtttaaaaattattctctaatgttttgagaaaagtttgtttgaaaacccgaataacttgttttctatgtttttaaaaataaattttatatataatatattacttttaatcattctccatatttatataataatttttattattttaaacagctctcataaaacaagtgaataaatgaatacaaataaaagattgtattttttgtttttttattatgaagtgttttttcctttaaaaaaaatttgaaaaacaaaaaattgtttttaaaaacaattgccaaacaatgccttagtaacctataacattgggaagttcattcaaatacttgctaggcaatcttgggttatataagtttcatgaaattcatgttgtaatttggtttttgattaaagttagaaactttaaaaaataaacttttatttataaaattactttaccaattaaaaaattcttaaaaaagagagtttatgttggaaattattaggaaaaattattcacaaacttggtaatacccatgcatttttcctaaattgacttaattgagcctttttctttttgaaaagcttataaattgtagagaatctagattattttttgaccttctttggtgtaaaattctcatatttttatgttcatatacctttttcatcaatacaaaatcaattgtctctataagcatttatcattgattttggatatactttaaactaatatatttcaatcctataaatttgtggttgctttgggtttacctttaagacatagtgaatatcattcctctgactttaaatcatccatgcattttttgtaggtttagtttggtgtaaaataataatatatagccattatgccttattgttttctgaaatattatatgtatggtttatataccaaaacatggccaattattgtaaaccttgtttagaaggtcaaatgtaatttttcaaagtgtttgaatagaactcttaatcatggtttcaaacatccaaatatgatttacccacattttaaaaaagggagagacccatgcttttccttaaatgaaatgtgaaaattatcccttttttatttttaataaaagtgtttttgaaatataatttgaaaatataaaatccaatcccgcaacaacataactacttaacttcttctattgttaaatgtagatttaaaacactatcccaaatagaccttatgctttgcttgatgtgtgcaaacaagcataaaagtaattagtctcaaagcaaaatatcaaatattattaaaccaaggcttaaaatacaaattaattcaaaattatggaatgtagttaggcatattgttaggtattgaagatgtagtccttctattttcattatacattcccataaccaattttattactttcaacctttttccccatctttgcttatcatgaaaataacccatccttcaatatttcagcttgcaaataatttatctccttcaacgttttgtagcaagctttcttcctttcatcaattatccaagaacaagtcaggtttgtttacattttaatttagtatttttgttgcttagctcatccaaagttgtttaacttgttttctatgctttctacttggcttaattaacctttagaaagtaatgaatatgttagatgattatgatggatttaaagctttttttccatctcattttgaatgcatatgatatatatatttcttttatttagaatgcattaattttatttgtagtaattttactatgatatgtcttttgtctattcatttcatttgattgattgttgaattatgagttgcataattgaactagataccttaagagccaccggagtgtgagttgaaaattgtagctgaacattcaaacagacccttgttaggtaacttccatataataaacttactccttgcttttctccaaactccctcttaactatatttaccctttactatagcctacaaatacaacctatcatttactatataatattcttttctaaacatatatatatatatatatagaggggggatagatgaatagatagatagagagagaaagacctaggaagactaaggtggtgtttgttttttggttgaatagaaaaaaccaaattatttaacttttttttattaagctaaaaataccttattgatattaaccaatttaactaaagtgaattttttatcagtaagtttagtttaattacgttggttgatatcaatgagttatttttagttgaaaagaaaaaaccaaatattttaactttttctattcagtcaaaaaacaaacaacaccttatattggtgagcatacataaactataagttcattcactcaaaatgactattacaacataaatctaagaagatgttgagttttttcataaacctaagaagatattaattttatcgttgaggtttaacttttttaatgatttgttccttctttactcttaaaaggcaaaatttattagagatttgtggtgtgtgacttactagatttgcttgtgttaatcaaagtattgatgacataggtttttataataaggttgtcttttacaatggagtacgtggaagcagtgctaacaagcattgggctattgaaggatatgtggccctccatttctaagtgcttcaactatcacaaaattcttgataagaattgcagaactctcaaagagaaaatggagagattgaagagtcgtgaacaagatgtcaaaattgaattacaaaatgcacaatatcagcgaaagaaagaaaaaaaagaagttgaaaattggttgaaagaagtgcaaaatatgaaagatgatctggaaaggatggaacaagaagttggaaaaggaagaattttctcaagattggggtttctaaggcagtctgaagagcatatagaaaaagtagatgagctacttgaacgcggtagatttcctgaagggattttgattgatgtacttcgagatgaaggaagggcattgttaacaacacaactaataggtgaaactacaaccaaaagaaatttagagaagatctggacatgcttagagaaaggtgaaatccaaagcattggagtttggggaatgggggggatcggcaaaacaactattgttactcatattcacaatctcctcttggaaaaaaaggatactttcggccttgtctattgggtgactgtatcaaaagattcaagtgttcgcaagttacaagatgtcattgctgagaaaataaatttagatttatcaaaagaagaagatgaaaggttaagatctgctttattatttgaagcattgcagaaagaaaagaaatttgtgcttatatttgatgatgtgtgggaggtttatccaccacgggaggttggaattccaattggagttgatagaggaaaactcataataaccaccagatcaagagaagtgtgcctaaaaatggggtgcaaggaaatcatcaaagtggaacctctttatgaggaagaagcgtgggagcttttcaacaaaacacttgagcggtacaatgcacttagccaaaaagaagaaaaaatagccaaggacattgtcagggaatgtgcaggtttacctcttgccatcgtcacaacagctagaagtatgagtgttgcatatgacattgctgaatggaggaatgcattgaatgaattgagggaacatgttaaagggcacacaattaacatggaaaatgatgtatttaaaatattggaattcagctacaatcgcttgaatgatgaaaaacttcaagaatgtttgttgtactgtgcattgtttcccgaagattataagattagaagggtgttgttgatcagatattggattgctgaggggcttatagaagaaatgggaagtaggcaagcagagcgtgatagagggcatgctatactgaataaacttgaaaatgtgtgtttgttggaaaaatgtgagaatggaaaatgtgtaaagatgcatgatgtgatcagggacatggctatcaatataacaagaaagaattctcgattcatggtgaaaactagaagaaatctggaagatctgccaaacgagatagagtggtcaaataatgtagaaagagtttcactaatggatagccatctttcaactttgatgtttgtaccaaattgccctaagctttccacattgtttcttcaaaaacccaagttttcttatccacctaaaggtctacatgaaggtcttccaaattccttctttgtgcacatgctgagccttagagttctggacctgtcatgcacaaacattgcattgctaccagattctatctatgacatggtgaatcttcgagctctaattctttgtgaatgtcgagaattaaagcaagtaggttcattagcaaagcttaaggaattgagagagttggatctcagttggaatgaaatggaaacaatacctaatgggatagaggaattggtcctcctcaaacatttcagttggatctcataccattcacgccagacaatacttcccaatcctctttccaaacttcttcccaatcttcttcaactacagtgtctaagacatgatggtgagaaatttctggatgtaggagtggaggagttgagtgggttgagaaagttggaggtccttgatgtcaatttctccagcctacacaatttcaatagctacatgaagacacaacactaccggagacttactcactatcgtgttcgattaagtggaagggaatattctaggcttctagggtcgcaaagaaatcgacatggtttttgtaaagaagtagaagtgtgggaatgtaagctgacagaaggagggaaagacaatgatgactaccaacttgtgctccctaccaatgtccagtttttgcagatatatacatgtaatgatcccactagcctattggatgtttctccatctctcaagattgccaccgatttaaaagcatgtttgatatcaaaatgcgaggggataaaatacttgtggtgggtagaggactgcattgactcattaaactcattgtttcttgatttattgccaaacttaagggttctcttcaagttgaaaccaacagacaatgtacgttgttccagtctcaagcacttgtacgtgagtaaatgccacaatctaaagcacttgctcacgcttgagttagtgaagaaccacctccaaaaccttcaaaacatctatgtccgtagttgcagtcaaatggaggatataatagtaggagtagaagaagaagatataaatgaaaagaataatcccattctctgttttcccaactttcgatgtttggagttggttgatctaccaaaactaaagggcatatggaagggaacaatgacttgtgattcccttcaacaccttttagtattgaaatgtcgaaatcttaaaaggctcccttttgcggtttcggtgcacataaacgatggtaatggccaaagaagagcttcaacaccacccctcaagcaaatcggaggagacaaagaatggtgggatggggtggaatgggacacacatcctcatgccaaatctgtttttcaacccctatttgtacaaggaaaaggtttcagagtaagtataattttttattttatgtatatggatttgatgaagaatctgtttgatcaagtacaaagtcaagataatctaacactttatttttatttttttggtttcatgcagtggctaaaaaacaattgggtcacaagtcgttggagagagactgtggacaatatatttgaagaagtgtaattgactccattatatctttttatttttttggtgtagccctaaagggttttttga

SEQ ID NO: 196 - DNA, 3978 bp, Zea mays
  source 1..3978: mol_type = genomic DNA
gacccagcggccatcggcctcagcccggcgtcagcctgccaagtcaagtcgtctcgctcaccaccttcctcgcataaaccgcgcacagggtaatcgtagagtcccaaggtctagtcagcgcggccatctatcctccacctctccacatttgcagtgtgagttttcttgattcccttcatccttttgttgcttcgtcactaaggacgctacaccagttcatcactcgctacttgtccactagtccagtctcggatatctcagctcggacgcctaccgatctgtccgtttcctacagccgctccccaaaaattccaactgattcctccgcctcttccgagttccccagaatccccagtttgatgctgcctctggccccctgcccaccgattggatcttggtcgatttctccgttcttcagatcctgtgcgcatccgctctaggtagtggccctttgctcggctcccttcctcctccttcgcccatgctcggatctttcaatctgcgccggttttgagttcttgcccctgctagctgccggccgtcaaaggctagagctttaatttcctggcaaagattggggattcctgctcgcgaggatggaattcgtggcgtccattgtcgacacggtgttccggccgctcaaggactacttcgcgcggaccgtcggctacgtcatgtcctgcggcgactacatcgacgcgatgggcaacgagatgaacgagctcaagagcaagcgcgacgacgtcaagcgcatggtcgacgccgccgagcgccagggcatggaggccaccagccaggtcaagtggtggctagagtgcgtcgccctgctcgaggacgccgccgcgcggatcgtcgacgagtaccaggcgcgcctgcagctccctcccgaccagccccccggctacaaggccacctaccacctcagcaagaaggccgacgaggctcgcgaagaggccgcgggcctcaaggacaaggccgacttccacaaggtcgccgacgaactcgtccaggtccgcttcgaggagatgccgagcgcgccggtcctcggcagggacgcgctactccacgagctccacgcctgcgtccgggacggcgacgtgggcatcgttggcatctacggcatggcgggggtcggcaagaccgcgctgctcaacaagttcaacaacgacttcctcatcaactcccacgacgtcaatgtcgccatctacatcgaggtcggcaaggacttcgatctcaacgacatccagaggatcatcggcgaccggctcggcgtgtcatgggagaaccggacgctcaaggagcgcgccggtgtgctctacagagtgctcagcaagatgaacttcgtgctgctgctggacgacgtttgggagccactcaatttccggatgcttggcatcccggtgcccaagcacaactcccagagcaagatcgtcttgacgaccaggatcgaggatgtgtgcgaccgcatggacgtccgccgcaagctcaagatggagtgccttccctgggagccctcgtgggagctcttccgtgagaaggttggcgaccacctgatgagcgctagccctgagatccggcaccaagcgcaggcgctggccatgaagtgcggcgggctgcccctcgctatcatcactgttggccgggcgatggccagcaagcgcactgcaaaagagtggaagcacgccatcactgtgctaaagattgccccatggcagctccttggcatggagtttgatgttcttgagcctctcaagaagagttatgataacctgcccagtgacaagttaaggctctgcctgctatattgctcattgttcccagaggagttctctatttccaaggattggatcataggctactgcatcggtgaaggtttcatagacgacttgtatactgagatggatgaaatatacaacaaggggcatgaccttcttggtgatctcaagattgcctctttgctggagaaaggtgaagatgaggatcatatcaagatgcaccctatggttcgtgccatggctctgtggattgcatcagatttcggcaccaaggagaccaaatggcttgtccgtgctggagttgggctgaaggaggcaccaggcgcagagaaatggaacgatgctgagcggatttctttcatgcggaacaacattcttgagttgtatgagaggcctaactgccccttactgaagacattgatgctgcaaggaaatcctgggctggacaagatatgtgatggattcttccaatacatgccatctctcagagtgttagatctgtctcatacctctatcagcgaattgccttcagggatcagttcattggttgagttgcagtacctggatttgtataacacaaacatcaggtcacttccaagggagctaggatctctatcgactctgcggttcttgcttctctcgcatatgccgctggaaacgatcccaggtggtgttatatgcagcctcacaatgctgcaagttctgtacatggacctcagctatggagattggaaggttggtgcaagtgggaatggtgttgattttcaggagcttgagagcctgcgtaggctcaaggcgctggacatcacaatacaatctgttgaggctctggagcggctgtcacggtcatatcgcctcgctggttccacaagaaacctactgataaagacatgctcgagcctgacaaagatagagcttccttccagcaacctgtggaagaacatgactaacctgaagagggtgtggattgtcagctgcggcaacttagctgaggtaatcatcgatagcagcaaagaagctgtgaatagcaatgcgcttccccgttccatcttgcaagctcgggcggaacttgtcgacgaagagcagcctatccttccaaccctgcacgatatcatccttcagggactgtacaaggtaaagatcgtctacaaaggcgggtgtgtacagaatctagcatcactgttcatctggtattgccatgggctggaagagctgattactgttagtgaagaacaagacatggcggcaagcggtggcggaggacaaggttcggcagcgtttagagtcatcacacccttccccaacctcaaggaactgtacctccatggcttggcaaagttcaggaggctcagcagcagcacatgtacactgcacttccccgcgctggagagcctgaaagttatcgagtgcccgaatttgaagaagctgaaactctcagctgggggactcaacgtgatacaatgcaacagggaatggtgggatgggcttgagtgggatgatgaggaagtcaaagcttcttatgagccattgttccgcccattgcactgaactcagttttggttgctagagattcttctgttattttagaggttgctcttccccgtgcatgcagtagatcgcgtgaattcagagatggccagtctgcactctgcagtgggtgtgattgtttgtattgtccatcttgcaagtacaagttgggcgattctttcttttttacccagctcgtgttctatagaaagaccagtcagcatgtgtggcagccaggaaactggcagatgtaactgtcgaaatctcctgaacagaatggctggtggataccggtacaaccattttctctaattctccgtttctgctctctgtgagaaataagttgagggtgtcattgcttttcctggtacgagctgaacacataccattctttgttcataggtcagaaattcagaacattgatagcagcttccttctgcatgagtgttgtgaagaaacagggaaggtccccatctgagcaagcccaaaaagctaaggtaggctggtatttaatccccaaagaccaaagtcctgagtaggacaaaactaggctctcagcacagcaaaatccatcaaacaaacaaagcaaaaaataactggccacccatagtcccgaattcaacagataaggtttgaccgtttgacctctttaaaagaaacgcttgtttggttggtc

SEQ ID NO: 197 - DNA, 2482 bp, Beta vulgaris
  source 1..2482: mol_type = genomic DNA
atgaatgccatatttactaaatttttccggatagaattgttctggcgtgatttacgatgtgatggaggaagaattgatacaagggttgaaactgttgttaataatcaatctgaactgggaactggtcatatacaacaagaaaataaacgcaggagattagtacaaccatctttgtgttttaattcagagtgtgtagataggataattagctggttagataatgatgaagttgatactattggtgtttatgggatgtgtggtgttggaaagaccactctggcaacgcagctcgaaactcggcttctaaaccatgatatccgttttagtgctagtcatgatgttgctggggtttctgtgggggtgaattgcagtgtatataaattgcagcaggatatcgcgggtgcttttgggattgatcttcaaggcgatgaggataagactagaagagcctctatgatagaggcgtttttttctcgtcgtgataagtgtgtactcattcttgatgatttgtggggtgattttcgtcgaaaagatgtaggcattcctaaggagtgcaagctagttttgatttctcagtcgttggatgtttgtcgtgtccttggttgtgaaaaggtgctcaaggttgagcctctttcggaaggaaagacttggaagttgtttaaccatagcatagggggtggtgttttgaataatgaagatgtgtgtcgtattaggaagcttgtgtatgataagtgtgctggtctccctcttgctatcgttgaattagccaagagattgagaaagatggttgatgataatggttttagttggagggaagtccttgagggtacgaatcccttttcttcgagatcaatgcacttggaagatacattcagtcacttgaagttgtcttatgaaaggctgagcgacatcaaactccagcagtgtttcttgtattctgcgatataccccaaaggccatgctattagtagagaagagctaattcgtgtttggattggagagaagttgatagatgatatatcatcattgctagcacagtatgacaagggccactcaatattgaataagcttatcaactcttgtttattggaagcatgtgaagattataaaggctgtataaagatccatgaagttgtgaggcatatggctctctcaatagctggagatagttttatgatagaagctggcgtaccttcaaaatttgagttccgggaaaatgttcgtgtagtttccttgatcaattctttaatttcaccgatcccatcaggtgcttcctcaaagtatcatactctttctaccttacttttgcaacacaacccccttgaactgattccagaatcattattcttgcaaatgcgtgcccttagagttctgaatctgtctgatactcgcctcattagacttcctagttccattggtgccttggaggagcttcgagtcttagatcttagcttttgtcagaacttgaagcaagtggcagccttatcaaagcttctcaagttacagtttctaaatctctctcagacgacaatcgaaaaagttccttgctctcttgaaaagttaaaaagactcacagagctcaacctatcctctattcctgaaccaacaaaaatccctagtgtagtattgcttgccctatgtagactcaagaaattaacatgccatgttataggcactattcatgagctgcagagaatgaactcgctagaaattcttgatgccaggttttttagcctctgtgacttgagtgcttatgtaaggtctcagcattggtgcatactagagagctacagtttacagcttggttgtgaggtgcaagctgagcaaccgtacatcagaagagtatcactgcagggtttttccttgactggtcaagaacagtacattgtgcttccaagtaacatccaggaattatatgtcgataattgcagaggcttccgtaggctatctgatgtcatgtatcctgttgcatatcaacataaaagttgccagaactatgaagttttttcaagcctcgaaatatgtgtgatcagtaggtgccctgacgttgagacattgtttgcagcgaattgggtagagaatctccaatcccttgagttattgcaagttgaagattgtggacaactgaaggaagtaataacagaagaatttgtagaacggggtgtctatcctgaaggaatttctgctcctatcaatctcctccagattaggcagctaattttcactcggttgcctcagatggaaagcatctataagggtcaattagtttgtgcttcgcttctgtcatgtacatttctggactgtccgaaactgacgcgccttcccttctcctgcatgggtaatggagaagaaacatttccctggcgtctggaatggattgaaggagaaaagaagtggtgggagatgttagaatgggaccaaccgggatctgaggctttgttcaaacctctgtttagatgcaagtctttggatgatcaatgac

SEQ ID NO: 198 - DNA, 3051 bp, Brassica napus
  source 1..3051: mol_type = genomic DNA
atggattgtctgggctcttttttgggttctttcttggcagaggcagggcgtggtatatgcagatcaacctatactcgagccatttataccatccggttcaagtcaaacatcaaagctttaaataatgcgctcagtggccttattgatgttcagaccaaagtggaaaaagatctcaaaaccttggagaccaaagggaagtccttgcacgggccactcagaacgtggttaagagacgtgaaagagattgtctctgaagcaaattcaattctggaagggcgtgtttcatgtgctctgtctttgagatgtaagcggagtaaaaaacttgtggttgttcttgataaagtcaagaagcttcataagctaggcgtagagcttctcgacatattttctttggaaggaagatctgtactagttgagagaatccttggaccctcgatcgctgatcaaacagtagcatcaaagatgttagtcaaagttcgaagctgtttgatgagggatggagttcaaaagatcggtatttggggtatgggtggagttgggaaaacaacacttgtaagggaactgaacaataagctgtggaaagaagctgatacgcagccttttggtatggtgatatgggttacagtttccaaagagtttgaattgggtagggtccagaggcaaatcgctgagagattggatgtggaaatcagattaggcgaaagcgaggaaagactggctagccggatatatggaaggcttgagcaagtaagtagctttcttctcattcttgatgatgtctggaaacccattgatttagaccagttggggattccacacacaaatgaacacaagtctacaaagattgtcttgacttctagatttctagaggtgtgccagagcatcaaaacagatattgacttcagagtgaattacttatgtgaagaagaagcttgggaattgttctgtaaaaatgctggagaagtaactagattagatcgtgttagacccatagcaaaaaaagtttctcgggagtgtggtggattgcctttggctatcatcacggttggaatggctatgcgggggaagaagaaggtggagctgtggaaacatgcccttaaagaactcaagagtgcggtgccttatgtcaagagtattgaagaaaagatctaccagcctctgaagttgagctacgacaggctccagccaaagatgaaatcttgcttcctcttctgtgccttatttccagaggattactcaatcgaagtatctgagcttgtgaggtactggattgccgaagggttcattgatgaaacacaaaactatagctacttaatgaatcaaggaatcaccttggtggagaatctgaaagactcttgcttacttgaagagggtgctcacggtgacacagttaagatgcatgatgtggttcgcgattttgccatatgggtcatgtcttcctcacgagatgatagtcactctcttgtcatgtccggtataggcttgtgtgagtttccgcatgagaagttcgttccttcaatccgaagagtttctttgatgaacaataagcttactaggctctcaaatcagctcccaaatcaagtggtaaagtgtgttgaactctcagctttgctgctacaaggaaactttcacttgaaggaattgcctgaggggttcttgatatcttttccagcacttcgaattttgaatctaagtgggacatgcataaggtcgttgcccaactccctcaacaagcttcatgagctaagatctctcatcttgagagactgctactaccttgaagaagttccttcccttttaggccttgcaaaaattcaaattctggatctttgtgccactcgaataagggaaactccaagagggttggaaactttgaacagcttgagactacttgacctctcccgaacgcatcacctcgaaagcattccagcagaaatcatcccgaagttatcaaatttagaggttctagacatgacccttagtcatttccactggggcgtccaaggacaaactcaagaggggcaagcaacacttgaagagattgcgcgcctccaacgtttgtcggtcctctcaatcagagtcgtatgtgttccacctctctcccctgattacaattcctggatagaaaggttaaagaaattccagttgtttatcggtccaacagcaaactctttaccttctagacatgacaagcggagagtgactattagtagtctcaatgtttcagaagcattcattggatggttgctagagaatacaacttctctagtgatgaaccattgctggggtctcaatgagatgctggagaacttggtaatcgatagcacgagtagcttcaacatgttaagatctctaacggtagagggttttggtggaagtataagacccgctggtggatgtgtcgcacagctggatcttctacctaaccttgaagagcttcatctgcgtcgtgtaaatctgggaaccattagagagctcgttggtcacctggggttgagatttgagacactgaaacatctagaaatcagcagatgtagccagctcaaatgccttctttcatttgggaacttcatctgtttcctgccgaacctacaagagatacatgttagtttctgtgaaaggcttcaggagctgtttgactattttccaggagaagttccaacctctgcttctgtggtacctgctctgcgtgtcataaagctaagaaatcttccgcggttgaggagattatgtagccaagaagagtcatggggatgtctggaacatgtggaagtgataagttgcaatcttctgaggaatctacccataagtgcaaatgacgctcatggagtcaaagaagtaagaggagaaacacactggtggaacaacttaacttgggatgataacactacaagagaaactcttcagcctcgtttcatagcagctgggaatatacctactggctctcttggaatgtcttgctatcagagctccaacacaattgaagaagcttctccaatttctactttaccagaatctcaggccgaagagcttcctgtagctacgatgtaa

SEQ ID NO: 199 - DNA, 3030 bp, Brassica oleracea
  source 1..3030: mol_type = genomic DNA
atggattgtctaggctcagccttgggttctttcttggcagaggcagggcgtggtatatgcagatcaacctatactcgagccacttataccatccggttcaagtcgaacatcaacgctctaaagaatgtggtcaatggccttgttgaagttcagaacaaagtggagaaagacctcaaaacgttggaaatcaaagggaagtccttgcatgtgcaactgaggagatggctaagagatgtggaagagattgtctctgaggcaaattcaattcaggaagggcgtgtttcatgtgctctgtccttgagatgtaagcggggtaaaaaacttgtggtagttcttgataaagtcaacaagcttcagaagctaggcgtagagcttctcgacatattttctttggaaggaagatctgtactagttgagagaatcattggaccctcgatcgctgatcaaacagtagcatcaaagatgttagtcaaagttcgaagctgtttgatgagggatggagttcaaaagatcggtatttggggtatgggtggagttgggaaaacaacacttgtaagggaactgaacaataagctgtggaaagaagctgatacgcagccttttggtatggtgatatgggttacagtctccaaagagtttgaattgggaagggtacagaagcaaatcgctgagagattggatgtggaaatcagattaggcgaaagcgaggaaagactggctagccggatatatggaaggcttgagcaagtaagtagctttcttctcattcttgatgatgtctggaaacccattgatttagaccagttggggattcctgaacacaagtctacaaagattgtcttgacttctagatttctagaggtgtgccagagcatcaaaacagatattgacttcagagtgaattacttatgtgaagaagaagcttgggaattgttctgtaaaaatgctggagaagtaactagattagatcgtgttagacccatagcaaaaaatgtttctcgggagtgtggtggattgcctttggctatcatcacggttggaatagctatgcgggggaagaagaaggtggagctgtggaaacatgcccttaaagaactcaagagtgcggtgccttatgtcaagagtattgaagaaaagatctaccagcctctgaagttgagctacgacaggctccagccaaagatgaaatcttgcttcctcttctgtgccttatttccagaggattactcaatcgaagtatctgagcttgtgaggtactggattgccgaagggttcattgatgaaacacaaaactatagctacttaatgaatcaaggaatcaccttggtggagaatctgaaagactcttgcttacttgaagagggtgctcatgttgacacagttaagatgcatgatgtggttcgcgattttgccatatgggtcatgtcttcctcgcaagatgatagtcactctcttgtcatgtccggtataggtttgtgcgagtttccacatgagaagttcgttccttcaatccgaagagtttctttgatgaacaataagcttaaaaggctctcaaatcaagtggtaaagtgtgttgaactctcagctttgctgctacaaggaaactttcacttgaaggaattgcctgaggggttcttgatatcttttccagcacttcgaattttgaatctaagtgggacatgcataaggtcgttgcccaactccctcaacaagcttcatgagctaagatctctcatcttgagagactgctactaccttgaagaagttccttcccttctagggcttgcaaaaattcaaattctggatctttgtgccactcgaataagggaaactccaagagggttggaaactttgaacagcttgagactacttgacctctcccgaacgcatcacctcgaaagcattccagcaggaatcatcccacagttatcgaatttagaggttctagatatgacccttagtcatttccactggggcgtccaaggacaaactcaagaggggcaagcaacacttgaagagattgcgcgcctccaacgtttgtcggtcctctcaatcagagtcgtatgtgttccacctctctcccctgattacaattcctggatagaaaggttaaagaaattccagttgtttatcggtccaacagcaaactctttaccttctagacatgacaagcggagagtgactattagtagtctcaatgtttcagaagcattcattggatggttgctagagaatacaacttctctagtgatgaaccattgctggggtctcaatgagatgctggagaacttggtaatcgatagcacgagtagcttcaacatgttaagatctctaacggtagagggttttggtggaagtataagacccgctggtggatgtgtcgcacagctggatcttctacctaaccttgaagagcttcatctgcgtcgtgtaaatctgggaaccattagagagctcgttggtcacctggggttgagatttgagacactgaaacatctagaaatcagcagatgtagccagctcaaatgccttctttcatttgggaacttcatctgtttcctgccgaacctacaagagatacatgttagtttctgtgaaaggcttcaggagctgtttgactattttccaggagaagttccaacctctgcttctgtggtacctgctctgcgtgtcataaaactaaggaatcttccgcggttgaggagattatgtagccaagaagagtcatggggatgtctggaacatgtggaagtgataagttgcaatcttctgaggaatctacccataagtgcaaatgacgctcatggagtcaaagaagtaagaggagaaacacactggtggaacaacttaacttgggatgataacactacaagagaaactcttcagcctcgtttcatagcagctgggaatatacctactggctctcttggaatgtcttgctatcagagctccaacacaattgaagaagcttctccaatttctactttacaagaatctcaggccgaagagcttcctgtagctacgatgtaa

SEQ ID NO: 200 - DNA, 2859 bp, Capsicum annuum
  source 1..2859: mol_type = genomic DNA
atgagaatttggaaactctggaaagatatgtaaagcaattattagataaagcactcgatgtgaagacagaggttgataatcgagagaaatctggtaggaggaagaggaaaagagaagttgaatcttggtttcacgaggttacaaagattgaagaagaattacgtgcattaaaagaagtagtaacaagagggaagaaaaatggaggtgttttggagaagatgaatggaagggtaggagaacttctcgagcaaagtaaacattttggaacgctcgtacatgatatgtatgagcctgaggagtgtccactgctggcatcacaatttaatgacaaaatatcaaaacaaaatttagaagtgatttggacgtggttacaggatgagaatgtctcaagcatcggtatatatggtatgggaggtgtgggcaaaaccactttggtaaagcatatacataatcgtcttgttaaggagattcattatcaagtctgctgggttactgtttctcaagggtttaccatcaaaggattacaatatgaacttgccaaaattttgaaactggacctttcagatgaggtagacgaacatagaagggcagccaagttaaattgggcattcaaaaataggaagaaaattgttatcatattggatgatgtgtgggatcgcctttgcttggagaagttgggttactctcttggcatggaaggctgtagactgattctaactagtcgctcatctgaagtctgcctaaagataggttgtcagaaactacgggaagtgaagaatctcaattctgatgatgcttgggagttgttcaggaagagtctaggatgcgagactctggttagtccagatatcgagccaattgccaagtccttggcgggaaggtgcaaaggcttgccactcgggctcatcactttggggggaagcatgagaggggtgactgatataagggagtggaagaatgcattgaaagaattccctgatgacatggaaagcgatgtcttcaaggtacttcagtatagttatgatcggttgagagatacaaatatgcaagagtgcttcttgtactgtgctttgtatcctgaggactgtgaaattggtagagatgaattaattggtagatatatgatggagggaatgatgaagggagatagcagggaagaagagtttaaccatggccataccatattgaataaactagtgaagatttgcttacttgaagcaacttccgaaggagtaaggatgcatgatttactcagggaaatggcattgcggatcacaaatgttaaaccaaggtacatggtaagggctggaataggatcacaagttccggaggagcaagattggatattcgatttggataaagtgtcttttcttaaaagctacataaggggaatccctgaagacatggctcccaattgcccctcattatcaagcttgcttttctctgattgtactttgagatggatcccagaatccttctttcagcatatgaacaacctccaagtactcgacttgagctataactcagtgcttatggatttgccgagttgcttttctaacttgagaagtcttagggcactctcacttcgacaatgtgatcagctcagatatgtgccaccactgggaaagctcaaaaatctgagggtgttagatgtatctcacactggtattaaggaagtacctcaaggcatggaaaacttattcaagcttaaatttctagatatgagtggaataggtcttgatgaactgccaaaggagatattacgtaaactttcccatcttcaatacctcaaacttccactacgtgtgaatgcaaaaattgaagacttgtccagcttggaacttctagaagaattcaaaggccgcttctgtgatttgcataacttcaacaagttcatgagaaatcgccgtaactgtgagaaagattggtggtatgacataagagtaatgccaaaggtgtccagcgctcaatgtttcttgcaccatgactctggaaatcgtagagtcgaacaaagaaaagtgattctacagagtttcagccttgaagcagatggaggagttccggcatcaattattcttccacattgcgttcaaaatctacatattgaaaactgtcgtggtctgcgtagctgcttggtggacagttttcagttacaggctactttaagaggcttgagctgtgtgatcaagcattgtgatgacatagaatggattgtcaatgtgcctgatgggagaaatactattacaaagacagactgcatatgtttccatagtctgactgttcgttatttgcgaaatcttgttggggtttgtaaggggaaaattgcatctcacaccttctcgggtctgacagaattgtgtttcagccactgcaataggatgaagaagttgtttccatgggctatcgtgcaggatctcaaaaaccttcaggtgctttgggtacagtattgtgatgagatagaagagataataggaagagaggaagagggaagtagccaaagcagcaatccccagattacgtctacaactgctgatcttccgaagttaaaacggctccacctaagtgtcctgcctgagttgaagagaatctgtgatggaaaattgatctgtgattcccttgaatcaatggattttaaatggtgtcccaatctgaagaggctgcctttctttactcccaatacaaatgggcatcctctcccttccctcaaaagaatcgaagttaaaaaaagttggtgggaaagattggagtgggatcaatcccatatcaagaccctcttacaaccttatctaattgcagatgatgatgaaaaattggaggggaaccaataccatgtcaagaaccactttcgaccttattaaa

SEQ ID NO: 201 - DNA, 2552 bp, Chenopodium quinoa
  source 1..2552: mol_type = genomic DNA
atgatttataagatgtttgggataggaaggcattatcgtggcgtaccatgtgatggaggtacaaacaatagtggagttgaaaatcaatctgaattgaggagtagtgttatggatgaatttcaatctgaatcgaggagtagtgtttatttacaacagcccgaaataaagcgcagaaaagttgaggtatcgttgagcttaaacacaaagtatgtgaacagaatcattgattggctaaaggatgataaaattgttagtattggtgtttatgggatggccggggttgggaagactaccctggcaaagcagctcgaatttcggcttcgttatgagacgccttttactgatgtttatgctgttggtatggtttctgtgggggtggattttaatgtatatcagttgcagcaaaaaattgctggtgcttttaggcttgatcttggaggtgatcgggatgagactaggagagcggccaagattcattcgtttttgtctcgaaatgataagtgtgtactcatccttgatgatttgtgggatgagtttcgctatgaagatgttgggattcctaggaaatgcaagctgattgctatttctcggtcacgggatgtctgtcgtatgctccactgccggaaatttgttctggttgagccactttcggaggaagagagttgggagctgtttcaccaaagcataggtggtgaatatttggattccaaacaagagtcccattttaggaagcttgtgtgtgataagtgttcaggtcttcctcttgctatcactgggttggccagatgcttcaggaagatggttgatgataatctttctagttggagggaagtccttgaaggtgcaaagtttccttttacgagacaagattacttggaagatgcatttagtcggctgaaattttcttacgaaaagttgaacaatatcacgctccagcgttgtttcttgtattctgccttgtaccccaaaggttttgacatacgcagagaagagctgattcgcctttggatgggtgagaagctgatagataatgtttcatcgttacaagcgcgatatgacatgggccattccatattgaataaacttctcaactcttgcttgctggaagcatcagaggataaaaggactatcaagatccatgatcttgtgaggcatatggctctttctgttgctggagatagttttttggtagaagctggcaagacttcaaaattggagttccggaagaatctccttgctgtttccttaattaattcttcaatatcgccgatcctcccagatggttctcaaaactatagctatctctccaccttacttttgcaacacagctcctttgagttgattcccgaatcttttttcttgcaaatgcgtgcccttcgggttctgaatttgtctgctactcgcttacttaaattgcccagttctattggtgccttggaagagcttcaattcttagatcttagtctatgtcagaacctgaagcaagtgccacaagtatctaaccttctgaagttgcagtttctagacctttcccagacagcaatcaagcaagttcctcgctttcttgaaaagttagaaggactcacagagctcaacttgtcctctattttggaaccaaaggaaattccttgtggggtgttgcctgccttattcagactcaagaggttagcatgccagattgcaggcgctatttctgagctgcagaatgtgaagtcattagaaattctcgatgccagatttttgagcctgtgtgacttgagcaactatgtaaggtctcagcactcgtgtcaattggacagatatcatctaaaggttggaggtgaggtgggatctgatcaaccatacagcagaaaagtatcattgcacggctgttctttgactgatcaagaggaagattacatcgtgcttcctaataacattcaggagttgtatgtcgacaattgtagagacttcccttgcctatctgatgtgttgtatcctgttgcatatcctcctagaactcatgatgatgcaattataggaagttgcaacgaagagcttagttgtttaaaccagcaagctaaacatttttcaagccttgaagtatgcatcattagtagatgccaggacattaagacattgtttacactaagctggatggagagtctccaatcccttcgattattacaagttgaagattgtagacaagtgaaggagttaatagcagtcgaagtagtggattgtggtccaactgaaggagaacatgctgtcatttgtcttccccaacttaggcagcttgttctcattctattgcctcagatggaaagcatctataagggtcgacttgtttgtgctttgcttctgtcttgtactgttatggactgtccaaaactgaagcgtcttccattctccaggatagatgcaggagaagagtcattcgtcccttgtctagaacggattgaaggccaagagaaatggtgggacttgttagtatgggatcagccggaatctaaatctttgctcaaacccctgtttagatgcaggtctttggatgacaagattgtttactactg

SEQ ID NO: 202 - DNA, 4062 bp, Citrullus lanatus
  source 1..4062: mol_type = genomic DNA
atggagatttgtgcgggcgccatcgtgggtccaatcggagaaaaaatcaccaactgcacggtggatccagttttccggcaactagattatctgcttcactttagaagcaatgtgaatgatctcagagatcaagggaagaagctggtggaaaccagagattttgttcaacactccgtcgactccgccaaaagcaatggagacgaaatcgaagttatggttaccgaatggttgagcatttctggtcaatttagtgaagatgtcgaaagatttttcaacgaagcaaacggccgaagtcttcgatggtggaatatgctatcacgacatcgatttagtagaagagctacgaaactagctatggaggttgttaaggccattgaaggagggagtttcgagagagttgggtttcgtaaacctccacagcaaattatgacgctaaacaacagtaagaagttcgaagcctttgaatctagggtttcgattctaaaggagataatcgaagcgcttggtgatgctaatgcgagcgtgattgtagtacatgggatggggggagtagggaaaaccaccctagttgaagaaatggcaagattagccatggagggaaagctttttgatgctatagcaatggtgactgtaaaacagattccaaacattaagagaatacagggggagattgctgatcagttagggttgaaatttgaggaggaaaaagaaagagtgagggccgatcgactgcgtcgaaggttagagatggagaagaaggttttagtgattttggatgatgtctggactaagcttgatctggaagaggttggaatttctagccatcataagggatgtaagatacttgtaacttctagaaaggatgatgtatttttcgatgattttggtactcagagaaatatcaagatcaatattctgtcaaaaaaggaatcaaggaattttttcaacaagatggcatgtgattctgttgaatcttctaatgatactgatcctgaaatggaagctcttgctactgaattagcagatgagtgcggaggattgccactttctcttgcaactgttggacaagccttgaaaggtaaagggcggccaagttggaatgatgccttgcaagaaatgaagtttcctgaccaacccaataactacggggtgaacaaagcggcatatttgtctctgaaactgagttataaatctctaaacagagacgaagcaaggtcattattcttactatgtagcttgtttccagaagattatcaaattaacatcaaatacttgttgatgtatgccatgggtttggggttattaaacagcatgagttctctagcggtggctagatggagaatactttctttggttgatgagctcaagacttctcacttgttgcttgatggggctgatagcgatttcgtgaaaatgcatgatatagttcgagatacagcaattttgattgcgtcaaaaacgaagtccaagtatttggttagacatggtagtggagagagtttgtggcccccaatggacgagttcaaagattacactgcaatctcattaggatgcagtgatcactctgaactcccagaatttatatgtccacagcttaggttcctattattagtgggaaaaagaacatctttgcgattacctgaaaatttttttgcaggtatgcaggaactaagagttctagacctgactggcttatgcattcagcggcttccgtcatcaatcgaccaactggtaaaccttcaaacattatgtctagatgactgtgttttgccggacatgtctctagttggtgaattgaaaaagcttgaaattcttagcttgagagcatctgatattattgcactcccgagagtaattggggaacttaccaatttgaaaatgttgaacttgtctgattgttcaaagcttaaggtgatccctgctaacctgttatccaggttgacagggttgtctgagctatacatggacaatagttttaaacattggaatgtaggagagatggagggaagtattaatgcaaggatttctgaattagacaacctgcaacggttgaccacattacacgtgcacattccaaatcccaccattctaccaaatgcctctcttttcaggaaattgagtggttacagaatactaattggagatggttgggattggtctgggaagtatgcaacttcaaagactctgaaactcaagcttgatagaagcattcagagagaggatgcaattcaagcactactagagaatactgaagatctgtatctagatgaattagaaagtgtgaagaatattctattcagtctagaccacaaaggctttcccaaattgaagagtttgcgtgtcaataacaatgttgagattgtgagtgttgtcaactcagataatatgcagcatccacacagtgccttcccattgttggagtccttatttctgaaaaatctagctgaacttggaagcatttgtcgtggaaggcttccacaaatgtctttccgtaacttgaaaagagtaaaagttgaaagctgtaacagattaaaatttgtttttccatctttcatgggcagaggccttatacatcttcaaaagctggagattagtgaatgtggtgtcatggaaacaatagtttccaagagcaatgaaacagaaatgcaaatcaatggtgataagtgggatgagaagaacatgattgagtttcctgaattgcgttctctgatactccaacatctaccagcgcttatgggtttctatagtcatgattgcatatcagtaccttcaactaaaatggattcacatcaaacaatttctactattgagcctagttatcgtccacttctcaaccaacaggtttccttccccaaattggaaacattaaaattacatgctttgaattcaggaaagatatggcaggataaacttgcttctagcttttatggcgttaaaactataacttctttgaccgtggagggttgtgcttcaataaaatatttgatgacaatcactgtggcaaaaagccttgtgaaacttgaacgcctcgaaataaacaactgtaagttgatgaaagctataatcatttcagaagatcaagatcgggacaacaattacccttccaaatctcatttgcaggaggatgttttcccgagcctggagtccgttgtaatctctcgcatggatgctttggagacattatgggacaatgaagctgcttcaggatccttcacaaaattgaaaaaagtggacatcagacactgcaaaaaactagagacaatctttccaaattacatgcttaacagagtgacaaatctcgagagactaaacgttacagattgcagttccttagtggagatatttcaagtgaaaatgccagttatcaatggcaaccaagtagcagcctttgtagctaaccatttgaaagagttgaagctgcttcgtctacctaaactaaagcatatatggagctcagacccacacagattattaagctatccatctctgcaacttgttcatacaattcaatgtcaaagccttttgaatctgttcccagtatccatagctaaggatctcatacgactcgaagagcttaaaatacagttttgtggagtcgaagaaattgttgcaaaacaaggagacgatggagatggagatggagacgcgtcgttcgtgttgagtgggttgacatcgttgtctctttggaatttgttcgagttcaagagtttttatccagggagatatactttggattgtccatcattggcatcgctagatgtacgccattgcaaatcattcaagttgatggaaggaactttggaaaattcgtcactctccgctgttgaaaaggttgaagatgatcaatcttccctaagagggaagttagaaagaagagaatcagatgcattgaaggagacatccacaaggaaagaagaaataacaaccatagtgcaagatgtagttgaagctgagttaactgaattaagagctcagttacaagctcttgtgatgggtcaaaatcaaatgatggaacgcttagcccaacttacaacaattgctaatgagactgtgtccaagtga

SEQ ID NO: 203 - DNA, 3885 bp, Cucumis melo
  source 1..3885: mol_type = genomic DNA
atggccatgtgtgccggcgccattcttaatccaatcggagaaaaaatcgccaactgcatggtggatcccgttttccggcaactagattatttgttccactttaaaaccaatgtgaatcgtctcaaagatcaaggcaagaagctggtggaaaccagagattttgttcaacattctgtcgactccgccaaaaccaatggagatgagatcgaagttatggtcactgaatggttgaccatagctgatcaatttagtcaagatgtcgataggtttttcatcgaagccaacggccgaagtcttcgatggtggaatatgttttcacgccatcgatttagtagaagagctaccaaattggctggggtagttgatgaagccattcaaggtgggggtttcgagagagttgggttccgcaaacctccacaagaaattatgacgctaaggaacaagttcgaagcctttgaatctagggttttgattctgaaggagataattgaagcgcttggcgatgctaatgcgagggtgattgtggtacatgggatggcgggagttgggaaaaccaccctagttgaagaaattgcaagattggctaaggagggaaagctttttgatgctatagcaatggtgactgtaaagcagactccaaacattaagaaaatacagggggagattgctgatcagttagggttgaaatttgaagaggaaaaggatcgaattagggctgatcgactacgtcgaaggttagagatggagaagaaggtgttactggttttggatgatgtttggagtaagcttgatttggaagctgttggaatttctagtcatcacaagggatgtaagatacttgcaacttctagaaaggatgacgtgtttttcaatgattttggtaatcagaaaaatatatatatcaatattctgtcaaaaaaagaagcaagggattttttcaacaaggtggcatgtgattctgttgaatcttctgatgatactgatcctgaaatggaagctgttgctattgaattggcagatgaatgtggaggattgccactttctcttgcaactgttggacaagccttaaaaggtaaagggcttccaagttggaatgatgccttgcaaggaatgaagtttcctggtgaacccagtaactatggggtgaataaagtggcatatttgtctctgaaagtgagttataaatctctaaacacagatgaagccagatcattattcttactatgtagcttgtttccagaagattatcaaattaacatcaaatacttgttgatgtatgccatgggtttggggttattaaacgccatgagttctctagcaatggcaaaatggagaatactttctttggttgatgagctcaaaacttctcacttgttgcttgatggggctgatagcgattttgtgaaaatgcacgatatagttcgagacacagcaattttgattgcgtcgaaaatgaagtccaaatatttggttagacatggtgctggagagagtttgtggcccccaatggatgagttcaaagattacactgcaatctcattagattgcagtgatcactcggaactcccagaatttatatgtccacagcttagattcttattactggtaggaaaaagaacatctttgcgattacctgaaaagttttttgcaggtatgcaggaactaagagttttagatctcactggcttatgtattcagcggcttccaccatcaatcgaccaactggtaaatcttcaaacactgtgtttagatgactgtgttttgccagacatgtctatagttggtgaattgaaaaagcttgaaattcttagcttgagagcatctgatattattgcacttcctagagtaattggggaacttaccaatttgaagatgttgaatttgtctgattgttctaaactcaaggtgatccctggtaacctgttatctaggttgacagggttgtctgagctatacatggacaatagttttaaacattggaatgtaggacaggtggaaggttatgttaatgcaaggatttctgaattagacaaactgccacggctgaccactctacatgtgcatattccaaatcccaccattctaccaaatgcctctgtctttagaaaattgagtggttacagaatactaattggagatggatgggattggtctggcaattatgaaacttcaaggaccttgaaactcaagcttgatagtagcattcagagagaggatgcaattcaagcacttctagagaatattgaagatctgtatctagatgaattagaaagtgtcaagaatattctattcagtctaggctatgaaggctttccgaaattgaaatgtttacgtgtaaaaaacaatggtgaaattgtgacggttgtcaactcggatactatgcatcatccacacagtgcctttccattgttggagtccttatttctgaaaaatttagctgaacttggaagcatttgtcgtggaaagcttccacaaatgtccttccgtaacttgaaaagagtaaaagttgaaagttgtgacagattaaaatttgttttcccatctttcatggtcagaggccttatacatcttcaaagcctggagattagtgaatgtggcatcatagaaactatagtttcgaaaagcaaagaaacagaaatgcaaatcaatggtgataagtgggataagaacatgattgagtttcctgaattgcgttctctggtacttcaacatctcccagcgcttatgggtttctattgtcatgattgcataacggtgccttcaactaaagtggattcacgtcaaacaatttttactattgaacctagttttcttccacttctcagtcaacaggtttccttccccaaattggagacattaaaattacatgctttggaatcgggaaagatatggcaggatcaacttccttctagcttttatggcgttaagaatctaacttctttgagtctggagggttgtgcttcagtaaaatatttaatgacaatcactgtggctaaaagccttgtgaatcttgaacgcctcgaactaaacgactgtaagttgatgaaagctataatcatttcagaagatcaagatctggacaacaattacccttccaaatctatcttgcagagcaaggatgtttttccgaacctggagtccctcttaatctctcgcatggatgctttggagacattatgggtcaatgaagctgcttcaggatccttcacaaagctgaaaaaagtggacatcagacattgcaaaaaactagagacaatctttccaaattacatgctgaacagaatgacaaatctcgagagattaaacgttacagattgcagttccctagtggagatatttcaagtgaagaaaatcccagttatcaatgccaaccaagtaacagccgttggagctaaccatttgaaagagttgaagctgcttcgtctacctaagctaaagcacatatggagctcggatccacacaaattcttaagctatccatctctccaacttgttcatacaattcattgtcaaagccttttgaatctcttccctgtatccatagctaaggatcttgtacgacttgaagtgcttaaaatacagttctgtggagttgaggaaattgttgctaaacgaggggatgatggagatggagatgatgatgcgtcgtttgtgttgagtgggttgacatcattgactctttggaatttgttcgagttcaagaggttttatccagggagatatactttagaatgtccatcattgacagcgctagatgtacgccactgcaaatcattcaagttgatggaaggaactttggaaaattcatcatcaatctcatccgcggttgaaaaggtatttacattttctctaattcttatatgctatttagcgtcctttttataa

SEQ ID NO: 204 - DNA, 4236 bp, Cucumis sativus
  source 1..4236: mol_type = genomic DNA
atggatataatttctcctgtcgttggaccaattgtggagtacactttaaagcctattggtcgtcaattgagttatctattcttcattcgccaacatattcaaaaccttgagagtcaagttgaattgttgaagaacactaaagaatcggtggttaacaaggttaatgaagcgataagaaatgctgaaaagatagaatccggtgttcaaagttggttgactaaggtggattccatcattgaaagatctgaaacgttactaaagaatctttctgagcaaggtggattgtgcttgaatttggtccagagacaccaattaagtaggaaagctgtaaagttggctgaggaggttgttgtgataaaaattgaggggaatttcgataaagtctcctctcctgtagctctttcagaggttgagagttcaaaggcaaagaattctgattttgtcgactttgaatcaagaaagccaactattgacaaaatcattgctgcacttatggatgataatgtccacacaattggagtgtacgggatgggaggtgttggcaaaacaatgctagtccaagagatttcaaaattagctatggagcaaaagctatttgatgaagtaatcacatcaactgttagtcaaacgccagacttaagaagaattcaaggacaacttggtgataagcttggactccgatttgaacaagaaacagaagaaggaagggctcttaagttactaaataggttgaagatggaacgtcaaaagatcctcattgtacttgatgatgtttggaagcaaattgacttggaaaaaataggaattccaagcattgaagatcacagtggatgcaagatcctatttacctctagagataatgatgttctctttaatgattggcgcacatataaaaattttgagataaaatttttacaagaggacgagacgtggaatttattcaggaaaatggctggtgagattgttgaaacatctgattttaagagtatagctgttgaaatagtaagggaatgcgcacatttgcccattgctattactacaatcgctagggcattgagaaataaacctgcatccatttggaaagatgccttaatccaactaagaaatcctgtctttgtgaatattagagaaataaataagaaagtgtattcttccctaaagttaagttacgattacttagattctgaagaggccaaatcactatttttgctctgtagtatgttcccagaagattatatcattgattgtcaggtcttgcatgtatacgctatgggcatgggtttattgcatggtgttgagagtgtagcacaagcacgaaataggataacgaaattagttgatgatctcatatcttcttctttgcttttaaaagaatcaaatgtcgatttggttatgtatgttaaaatgcatgatatagttcgtgatgtggctataataattgcatctaaagatgatcgtatttttacactaagctattccaaaggattattggatgaatcatgggatgaaaagaaactagtaggtaagcatactgcagtgtgcttaaatgttaaaggtttgcataaccttccccaaaagttaatgctacccaaagttcagttattggtgttttgtggaactttattaggtgaacatgagttgccaggaacattttttgaagaaatgaaagggatgcgagttttggaaataagaagcatgaaaatgcccttattgtcaccatcactttactctttgacaaaccttcaatcgttgcatttgtttgattgtgaattggaaaacatagatgtgatttgtgagttgaacaaacttgaaaatctcagcctaaaaggatcacatatcatccagatccctgcaactataagtcaattgacacaactaaaagtattagacttatcagaatgttatgcactaaaggtaattccgcctaatattcttgtaaatttgacaaagttggaagaattatatttgctaaattttgatggttgggaaagcgaagaattgaaccaaggaagaagaaatgctagtatatctgagcttagttacctttctcagctttgtgctttagcattacatattccaagtgaaaaagttatgccaaaagagttgttttcaaggttttttaatttggaaaagtttgaaatttttattggtcgcaaacctgttggacttcacaaaaggaaattctcaagagtgttgtgtttgaagatggaaacaacaaatagtatggataaaggaataaacatgttgttaaagaggtcagaaagattacatttagtaggatcaattggtgcaagggttttcccgtttgagttgaatgaaaacgaatcttcatatttgaagtatctctacatcaactataattcaaattttcaacattttatccatggacagaacaagactaatttgcaaaaagtcttgtccaatatggagcgtctggaattgagctatttggagaatttggagagtttttttcatggtgatattaaagatatttctttcaacaacttgaaggtcataaagttgttaagttgtaataaattaggaagtctttttttggattccaacatgaatggcatgttattgcatcttgagaggattaacattactgattgtgagaaggtgaaaacagttattttaatggaaagtggaaacccatctgaccctgttgaatttacaaatttgaagcgtttaaggctaaatgggttaccacaacttcaaagtttttactccaaaattgaacaattgagtcctgatcaagaagcagaaaaagatgagagaagcagaaatttcaatgatggtttactttttaatgaacaggtatcacttcctaatctggaggatttgaatattgaagagactcacaatctgaagatgatatggtgcaatgtactcattcccaattccttttctaagctcacatccgtcaagattattaattgtgagagtcttgaaaaacttttttcttcaagtatgatgagcagacttacatgtcttcaatccttatacattggaagttgcaagttattagaagaggtattcgaaggtcaagagtcgggcgttacgaacaaggatattgatttgctcccaaatttgaggcgtttggacttaattggactgccaaagctgcagtttatatgcgggaagaatgattgtgaatttctgaattttaaaagtatacctaatctgaccattggtggttgtccaaaacttgaagcaaagtatttaatccaagttcttgacaacatgaaagatctgacaatagatttaagaagattggaggagattttaaacaaggaaaagtcagtggtagaacttgatctttcattggagacgtccaaggatggtggagagttatttggaaaacttgaatttttggacttgtgcggttcgcttagtcctgactacaaaacgattactcatttgccaatggaaattgttccaatattacacaaccttaaaagtttgattgtgaaaaggacattcttggaagaaatctttccaatgacaagattgggtaatgttgaagaatggcaaaataaaagattcaagctttcctctttggcattaagggaattgcccaaacttaagcatttgtgcaacgaagacttacaaaagaattcttcgatgcttcaaaatttgaaatatttctccataaagggatgtgggaaattgaatatgtttgttccatcgtcaatgtcgtttagaaacctggtcgatttgaaagtgatggaatgtcataaattgatctatttgataaatccttctgtagctagaaccatgggtcaacttagacagttggaaataagacgatgcaaaagaatgacaagtgtgattgctaaagaagaaaatgatgagattttattcaacaaattaatctacttggttgttgtggatttgcccaaattgctgaactttcattccggaaaatgtaccattagatttccggtcttgagacgaataagtgttcaaaattgtcctgaaatgaaggatttttgtactggaattgttagcacgcctcatttgctaactgaaagtattatacactacgatgatgcaactaataaatatattccaatacttaaagattattcaaaagaggccattgtaaaagatatgaatgttgctattcgacaagtttgggagaaccattacgacttcaaccttcactgtttgtttgaagtagagaatttggaggaaaaccgagttgatgttaaaggaattatattcacacattga

SEQ ID NO: 205 - DNA, 4086 bp, Cucurbita maxima
  source 1..4086: mol_type = genomic DNA
atggagatttgttctgcggccattgtcggtccaatcggagaaaaaatcaccaactgcaccgtggatccagttttccggcagctggattatctggtccactttagaagcaatgtaaataatctcagtgatcaacgaaagaagctggtagaaaccagagattttgttcaacacgctgtcgattccgccaaaagcaatggagatcaaatcgaaggtatggttgtcgaatggttgagcattactaaaaaattttgtgatgaagtcgatagctttttcaatgaagcgaacggccgaagtcttcgatggtggaatatgctatcgcgacatcgatttagtagaagagccacgaagatggctacggaggttgttaagaccatcgaagaagggagattcgagagggttgcgtatcgtatacctccacaggggattatgatgctaaacaatagtaagaagttcgaagcctttgaatctaggattctgattctgaaggagataattgaagcgcttgctgatgctaatgcgagcgtgattgtggttcacgggatggggggagtagggaaaacaactttagttgaagaaattgcaagattagtcatcgagggaaagcttttcgatgctttagcaatgacgactgtaacgcagattccaaatgttaaaagaatacagggggagattgccgatcagttagggttgaaatttgaggaggaaaaggatcgagtgagagccgatagactacgtcgaagattagagatggagaagaaggtgttggtgattttggatgatgtctgggctaaccttgatctggaagacattggaatttctagccatcacaagggatgcaagattcttgtgacttctagaaaagatgatttgtatttcggtgattttggtactcagaaaaatatcaagatcgatgttctggcaaaaaaggaagcaaggaattttttcaacaagatggcatgtgattttgttgaatcttctaacgattctgatcctgaaatggaagctgttgctactgagttggcagatgaatgtgcaggattgccgcttgctcttgccactgttgcacaagccttgaaaggtaaagggcggccaatttggaacgacgccttgcatgaattgaagtttcctagccaacccaataactacggggtgaacaaagaagcatattcttcattgaaattgagttataaatctctaaacagagacgaggccaggtcattattcttactatgtagcttgtttccacaagattatcagattaacatcaaatacttgttgatgtatgccatgggtttggggttattaaatggaatgaattctctagcagcagcaaaatggagaatactttcgttggttgatgaactcaagacttcttacttgttgcttgatggggttgatagcgatttcgtgaaaatgcacgatatagttcgagataccgcaattttgattgcgtctaaaatgaagtccaagtatttggttagacatggtgctggagagagtttgtggcctccaatggacgagttcaaagattacactgcaatctcattaggctgcagtgatcactctgaactcccggagtttatctgtccacagcttaggttcctattattggtggggaaaagaacatctctacgtttacctgaaaagttttttgcaggtatgcaggaactaagagttttggacttgactagcttatgtattcagcaacttccatcatcaatcgaccaactggtaaaccttcacacattatgtctagatgattgtgttttgcctgacatgtctatagttggtgaattgaaaaagcttgaaattcttagcttgagagcatcggatattattgcactccctagagtaatcggggaattgaccaatttgaaggttttgaacttgtccaattgtttcaaactcaaggtgatccctgctaacctgttatcgaagttgacaggattgtctgaattgtacatggacaatagttttaaacattggaatgtaggacatatgaatgagggaaatattaatgcaaggatttctgaattaaactacctgccacggttgaccactctacatgtccacattccaaatcccatcctactaccaaacgcctcggttttcgggaacttgactggttatagaatactaattggagatggatgggattggtctggaaagtttgaaacttcaaagactctaaaactcaagcttgagagaggcaatcagagagaggatgcaattcaagcactactggagaatactgaaaatctatatctagatgaattaggaagtgcgagtgcgagggatattctatatagtttagaccataagggctttccgaaattgaagtgtttgcgtgtcaaaaacaattctgagattgtgagtgttgtcaactcagatagtatgcagcatctacacagtgcctttccattgttggagtccttgtttctgaaaaatctagatgaacttggaagcatttgtcgtggaagacttccacaaatgtccttccgaaacttgaaaatagtgaaagttgaaagctgtaacagattgaaatttgttttcccatctttcatgggtagaggccttatacatcttcaaaagctggaaattagtgaatgtcgagccatggaaacaatagtttccaagggcattgagacacaaatgcaaatcaatggtgataagtgggttgagaagaacaagattgagttccctgaattgcgttctctgattctccaacatctgccggagcttatgagtttctactgttatgatagcttagcagtgccttcaactaaacgggattcagatcaaataatttctgccattaagactggttttcatccacttctcaaccaacaggtttccttccccaaattggaaacattaaaattacacgctttgaatgcgggaaagatatggcaggatcaagttccttctagcttttctggcgttaaaaatctaacttctctgagtgttgtggattgtgcttcaataaaatatttaatgacaatcactgtagcacaaagccttgtgaatcttgaacgccttgaaataaacaactgtaagatgatgcaagctataatcatttcagaagataaagatctggacaacaatcacccttccaaatcgattttgcagaaccagaatgtttttccgagcctggagtcccttgtagtctctcgcatggatgctttggagacattatgggacaaggaagctacttcaggatccttctcaaagttgaaaaaagtggacattagacattgcaaaaaactggagacggtctttccgaatttcatgctcaacagactgacaaatctcgagcgattaaacgttatagattgtagttccgtagtggagatatttgaagtgaaagtgcctgttatcaatggaaaacaagtagcagccattgcagcaaaccatttgaaagagttgaagctgcttcgtctacctaaactaaagcacatatggagtacagacccacaaagattcttaaactatccatctctgcaacttgtgcatacaattcattgtcgaagccttttgaatatcttcccactatccatagctaaggatctctttcaacttgaagagcttaaaatacagttctgtggagttgaggaaattgttgcaaaaggaggagctgaaggagatggagatgaatatgaagatgcgtcgttcgtgttgagtggcttgacatcgttgtctctttggaatttgttcgagtttaagaggttttatccagggaaatatactttggattgcccatcattgacattgctagatgtacgccattgcaaatcattcaagttgatggaaggaacttcagaaagttcaacactctcctccgctcttgaaaaggctgaagatgatgaatctacccagagagggaagatagaaagaagagaagcagatgtgttgaaggaggagacattcacaagaaaagaagaaataacgacgacagtgcaagataatgttgaagctgagttaattgagataagagctcaattgcaagctcttgtggtgggtcaaaatcaaatgatggaacacttggcccaacttacaacaattgctcgtgagggtatctcaaagtga

SEQ ID NO: 206 - DNA, 3768 bp, Cucurbita pepo
  source 1..3768: mol_type = genomic DNA
atgggagaatatgtgattaaacccattggacgtcaactaagctatctcctctgctacaacagaaacaaaaataagctcaaagagcagctccaagctctcaagacagcgcgcagggacgtccaaggacgagtccaagaggcaagaagcaacgcatatgcaatccgcgaggaagtttcaaagtggttggctgatgcagacaacgccatccatgatgagctatcatcaaattcttcaaccccatcagcctttaacttgatcgatagataccaattaggcagaaaaacaaagaagaaaattgaagctcttcatgaactcatagccaaaagaatcaactttgtggaagtgggctaccctgcaccgcttttagagactaagaacatcattgatattcaaagagctggagtggaaattctagtcccaatagctgaatcaataatgggagaatatgtgattaaacccattggacgtcaactaagctatctcctctgctacaacagaaacaaaaacaagctcaaagagcagctccaagctctcaagacagcgcgcagggacgtccaaggacgagtccaggaggcaaggagcaacgcatatgcaatccgcgaggaagtttcaaagtggttggctgatgcagacaacgccatccatgatgagctatcatcaaattcttcaaccccatcagcctttaacttgatcgatagataccaattaggcagaaaaacaaagaagaaaattgaagctcttcatgaactcatagccaaaagaatcaactttgtggaagtgggctaccctgcaccgcttttagagactaagaacatcattgttcctggtgggtatcttgttctggaatccaagatttcaatggctaaacaaatcaagaaagcacttcaaaaggcagaggttagcagggttggtgtttatggcatgggaggcgttggaaaaacttacttgcttaatgaagttaagaagatggttttggaagaaaaagtgtttgatcgagtgattgaagtgtttgtaggccaatccaatggagttacacagattcaagaacaaattggagatgttttgaatgtaaaattaccaaagagtaaggagggaagagcttcttttctaaggaataatttggctaaaatggaagaggatgttcttattatattggatgatttatggaaggaatatgatcttctaaaagagattggaattccttgttcttcatgtaaagtacttatgacgagtcgatcacaggatatattgatgaacaacatgaacgcaacagagtgttttcaggtgaattctttaagcgaagaggagtcatggaagtttttcacaactatcattagtgatgagtttgatactcctgatatggagaatttggctaagatggtagcaagagaatgtggagggcttcctcttgcgcttgataccattgccaaggcattgaaagggaagcatatgaaccattggaaggatgctttaagcaaattaagaaaccccataggaatggatatcaaaggagttagtgacaaagtttatgcttcattgagattgagctatgatcatttagttggagaagaacccaagttagtgttccttttatgcagtgtttttccagatcattacaagatttctttgaatgatttgcaaatgtatgcaatgggtatgagattattgagaaacataaacacatgggaggatgtgaagaacagagtattgaaattggttcatgatcttaaatcttgttctttacttcttgaacattcaagtgataaatatgtcaaaatgcatgatattgttcgtgatgttgccatacacattgcatcaatggagggtatcatgccaacattgagctttggatctaagcttagtgattgggaagatgagtatcaaagtggagctcatcgtgctatctttgtaaactgtgataactttcaaaaacttccccaaaacttgaactttcctgatctcgagctcttgatattaagatcatcaaatgggtttgtgggaaatcttgaaatcccagatgggttttttgcaggaatggaaaagattaaagctttggacataacagggatgagtttcctccaaacttcttggagatcattgaagaacattcgaacattatgtctgttacgctgtgaattcaatcatattgacacaattggggagctgaagaacttggagatcttaaggatttgtagctgcaaggagctggatcatttacctgtggctatgaatcaattaacagaacttaaggtactcgaagtgttaaattgctcgaacttggaggtgtttcctgcaaatattatttcaagtatgaacaaactagaagtgttgaaattacgggacagctttgatagatggggagaagaagtatggtacaaagatgaagtaattaagaatgttacactttctgagctgaaccgtctgccacgcctttcaagtttaagattagagatctcaaaattccgctttatgtcgcagataacctcggaaacatcaagcaagttgaaagaattctgggtttgtgttaataaaacagatgattttattctccccatggtttctcatgaatatgcaacaactttgattcttaatattgttttaccaaaagccattcatggagggcttgaaacacttttgaaaagatctgaacgattggttgtaagggattcagtgggtcgttttataaacgatgttttcaatccaaatagtaatgggtatccatttttgaagtatctatggataattgatgtacatggacactcaaatttgccatacctgttcagatctgagttcaattccttggagttcttgactgtttatggaatggacagattgatgaatttagctcccaggaattctccaatccttcctttcaagaagcttaaatccatatcaattcgatcatgtggggagatcagaaatctgttctcaatctctgttcttaaagcgcttgcagatcttcaagatatttctgtgacggattgtggcatgatggatgggattgtatcgatagaaactgaagaacagagcactattttcactggaataacctctttaacacttgaaaaagtggataaacttaagagtttctgcaccaaattgttcatccaagaagacccacaaagaacaatcccctgttttgatcaacgggtttcatttcctgaattgaagcatttatcaatcaccagaggaaacaatttggaggcattatggcatagtgatgggttggcttcaaattccttcagcaaactcgaaacggtgagaattgaaggctgcaagcgattaagattcatgtttccatcgaacacaagcgcgaggttggacagtttggagaggatcgaggtgaaaaaatgtgggaatttgaagcgattactgccatcatcagtggtgttctggagcttgagtgagctgagcgtggagaaatgtaatggaatgatgaatttgtttagcttgacagtggcgaaagggctagtgaatctctggtcgattgaagtgcgttgttgtagaggaatgaggtgcgtggttgcggcggaggaagaacagggtggcgttgtttttaggggattgaggagggtgcgcttggattggttgccggaattggttagtttttacggtgggaaatgcagggttaagttccccaggttggatcgtttgttcattttaggatgccctaagatgaagacgttttcgcgtggagttgtagtgacgcccatattggatagagtttggattgatgtgagatactttggagtggcggtggatgtgtta

SEQ ID NO: 207 - DNA, 3018 bp, Solanum lycopersicum
  source 1..3018: mol_type = genomic DNA
atggtgattgaggcattatcaatcctcaaagaaaatgtatgggatccatacatgggacttgaggaaaaactagaaacagtaaaaagaaagatggaagtgttgattagtcgaaggaaggatatcgcggatgaggtaaaggatgcagagctccattcgagtaaaagacggaagacagaggttaaaaattggctgagtagtgtacaaaagctagaaaatgagttccaatgctttgagcaagaattagaacagagttctagcttttcgcgcataggattgtcaaatcaagctgataaaatacatgatgaagtggaatatctcctagatcaaggtaaattttctgaaggaattttgcttcatttgaatgaagagaagatgcaacagttggtgatgaaaaacttgaaaggtgaagcatttgtggagagtctaagaaaggtgttaacgtcgttgaatgaagtttcaagtattggcatttatggtatgggaggcgtggggaaaacgactcttgcaatgcatatacatgatcatctcctcaaagaatcaagattttggggtaatgtctactggattactgtatcacaagattttagcatttctagaattcaaaacaatattgctaataccatcggtctagacctttcgagtgaggatgatgacaagaagaggacagcgaagttgttccatagtttgaagaggaagaaaagttttgtgttcatattggatgatgtatggaacatatttgatgtaacaaaaatgggaattccactggaaattggtggaggtaagatgatcataactagtcgatcgtctgaggtgtgtgataagattggctgtcagaagaaagtaaaagtggaaactctttcaatgactgaatcatgggaattattcatcaagacacttggttgtcaatggggagatctttcgatggagatagaagaaatcacgaagaaaatgactaagaaatgtgatggattgccactggggataataactatggctgcaagtatgagaggagttaacgatgtttttgaatggagggatgcgtttgaagaattcacaaactcttgtatggaaatggaggatatgaacaatgatgtgtttccgattctccagtgtagttataaaagactgagagatccaaagctacaaaagtgttttctttattgttgcttataccctgaagattacaaaattcggagagatgaattggttcgccttctcatagtggaagagttacttgtcaaaaggaacagcaggaaagcagaacttgaccaaggctatgcagtattgaacaaattggaaagggcgtgcttactagaaagtgtcgtgaatggaaatggatctcgatgtgtgaggatgcatgatttagtgagagagatggcgttgcgaattgcaagagatgaaattaatttgatggtgagagcaggagcacaattgcgcgaaataccaggggagcaagaatggacagaggacttagacaaggtttctttgatgaataatgatatgaccaaaatttcacagccattatcctctatatgtccgaaacttacaactttgttattgcaaggaaattccagtctgagtcaagttatcgatccctttttcgtgcagatgcctggtctacgtgttttggatttaagctacaccgcgatacatcagctgcccagttctgtgtcaaatctagtaagtctctctgcattgttgttacgacgttgctatggacttagatttgttccatcattgaaaaatctcaagaacctcattgagttagaccttttccacacaattatccaggaagtgccccaaggtttagaaagcttagttaaattaagatgcttggacatgacaagagatgaaagagttccaaagacactatctaagaaaccagctgtagatattttagctaagctctctaatcttcaattcctctcgattccttttgtcgtacgagtagaagacttagtagggatgagacaactagaggtatttcatggaaagtttgttgatgtttgtagttttaatggatttgtcaaacatcaacagcaatgggggaagccgagttcctttgtaattgctttagatacaaaaagttcttccgagccaattttggagagtggtcatctttcttatgatttgaccttttacgctgaacgggtgattctaaggcatcttcttgtcactggagacagcgtagagatgctacgctatgaccagatagtagatgaagcgcgaaatgtgactcttctaccagtaaacattcaggagttgcttatttcagaatgtgattttcgtacgttgggtaatagcttgttagatgctattccatctctgattcagaccaaagacttgaggctaattaaaattggaagatgcaatgggatagagttcctaattaggacatcgaattgtaggtcaacgagacatcagggactcatgtctacttgtaatacactcgaaactcttgagagattggttctgcattgcttaaaagagttcagtagtctttgtaagttggaattaggagaacctttgcctcctgttggaaccttttcccatctccggtgccttgaagtttcgttctgtgataaaatgaagaagttaatcccgaagtggctgctgcaatacctccaaaatctcacagaaattgctgtaaggatctgcgatgaaatggaagagataatagcagatgatgaagaagaacaagttaaacaatgcgcgagctctgcctcatcatcgcctattattgttctaccgaagttgcagatgctttatttacatgcattgccagaactcaagagcatatacaagggaagaatgacttgtggttctattcaacgtgtaacagtttcgctatgtgggaagctaaagagacttccatttactcttcctcttcaaaatgggcagccatcagctccaccagagcttgaatatattagaatgagtgaaaaatcatggaaaactttggattgggaccatcctcaatacaagaatgtcctccatccttttgtgaaaaaaacatag

SEQ ID NO: 208 - DNA, 2700 bp, Daucus carota
  source 1..2700: mol_type = genomic DNA
atggatattattactcccattatagcccttattagtgaattcattggtttggtttcgaaaaatataaacactgctggtgacttggataatagggggacttctctcaagactgcacttgaggaactaacagaagcaagagaagacttggagagtcaagttaatcaagcagaatctttaggattaacttgcacaaatcaagtcaaagggtggctgaaaagagcagaaaaacttgaatttgaggtgagattaatggttcaaagagttgatcagcaggaacaagacactgttttgtgctgctgtgcaaactgttgttcaagatacaagttgagcaaaaaggttctgaaaaagattaatattacaaaggagtttatggaaaagagtaaagcattagatatgaattgggttgatggaaatgtgattgtacctgtgatggagatccccagtgggcctgttattggcatggatgtcatgttggagaaggtttatgaattgcttgacaaggaagaggttggaatcattggagtttatgggatgggtggagtcggaaagacaactcttttgaaatgtataaacaatgagtttttgacactaaaccatggttttaatgtagtgatttgggttactgtatctagagaatttgttgcagaaaagattcagcaagctattatgtcgaggctgggcctgtcgtgggatgaggccgaggatcaagaacagctagcttcgaagatatataaggttttgaagatgaagaaatttctgttgttgctggatgatatttggagaggagttgaccttgagaagataggggttcctattcccaagaaggagaacaattgtaaagtgatattgacttctcgttctatggatgtgtgcagtgacatggatgctcactgcaagcttaaagtagattttttgagggagaaggaatcgtggcatctttttgcagaaaaggttcgtcgagatgatatccttaattctcaatccatacagccacatgcccaggccattgtcaagaaatgtagaggccttccgcttgctctaatcacaattggaaaagctatggccaataaagagacggaggaagagtggattgctgcaaaagaaatgcttaacaaatccccatcagaacttagaggtatgaaagatgtgttcacacttctgaaatttagctatgaagagttagctaatgacacgtttaagtcattgttgttgtactgttctttgtttcctgaggattgttctattgagaaagaattgcttgtagaatatatggtaggggaaggattattattgagctcccatgagatgggacacgccctcattggatctctcaaagtcgcttgtttcttggaaaagggtgaccaggaaacccaagtaaaaatgcatgatcttgtccgaagctttgttttgtggatagcgttggataatggagatgacgatatgaagttcttagttcagcctagtgcaggacttactgaagcaccttctgttgaaaagtgggaaagagcacatagaatttcattgatggacaatgaaattaccgaactatccgaagtacctgtttgccaacacttatcaaccttgctgctccaatggaacaggagtctgagtaaaatttcagggggattttttcaatacatgcctgttcttaaggttcttgatttatcatataccagcatcagagagattccaaaaagcatctcttatttgtgtgagttgcgttatcttgatctatccgggactaaattgagcacattgccaaaagagatgggaagtttgaaaaatctgaggtatctggatttgaagcgcactcattatctcagaacaattccccgcgaggctatatctggactttctcaattaagagtcttaaatctctactacagttatgtaggctgggaaattcaagatcttactatcgagaatgaaataagatttgtggatttggaaaagctgaggcatcttgccgctctagggatcactgtaactgaagtagaggccctggaggaactctttgtttttaaaaattgcatccaatttttgtacataacatcatgtgaacgcttgtataagttacatctctcattaaaccccggtgatggcaagaggttgagaaggcttagcatcaacgattgctctgatttacagtacctggccattggcagcaaggctgaaaacaactggttgcctagattagaggcttttgcactaaacaatcttcccagcttgatcaaagtgtgggaaaaagcagtgacacccggagcacttcaaaatcttcgttccattaccatctggtattgcaacaagttgaagaacgtttcatgggtcataaatctcccaaagctcgaaatgttgtacttgttttactgcaaaggaatggaagaagttataaatgtagatgatgtggaggccgggggagttgccaacacatttctgtcacttcgaacgctatctatgagagatctaccatgcttaactagtatctcaagatggaagatggatttcccttcattacaaaaaatcgctgtgattgaatgtccgaggctaaagaagttgccactaaagtctcctgaggtttcagcaccacagacatttacattgtatggtgagaaggcttggtgggatgaattggagtgggatgaagtcggtgctcagtctgctttcctaccacattttataccaactggtcagacaaattga

SEQ ID NO: 209 - DNA, 2568 bp, Eruca vesicaria
  source 1..2568: mol_type = genomic DNA
atgttagtcaaagttctaaactgtttgatgagagatgatgttcaaaagatcggtatttggggcatgggtggagttgggaaaacaacacttgtcagagaactgaacaataagctatggaaagaagctgatacgcagcctttcggtatggtgatatgggctacagtctctaaagagtttgaattgggaagggtccagaagcaaatcgctgagagattggatatggaagtgaaactaggagaaagcgaggaaacactggcgagacggatacatgaaaggcttgagaaagtaagtagctttcttctcattcttgatgatgtctggaaagccattgatttagaccagttggggattccacaaacatatggacgcaaggctacaaagattgttttgacttctagatttttagaggtttgccagagcataaaaacggatattaacttcagagtggattgtttatgtgaagaagaatcttggaaattgttttgtaaaaatgctggagaagtaactagattagattgtgttggacctatagcaaaagaggtttctcgggaatgtggtggattgcctttggctatcatcacggttggaatggctatgcgagggaaaaagatggtcgaaatctgggaacatgcccttgaagaactcaagagttcggtgccttatgtcaagagtattgaagaaaagatctaccagcctttgaaattgagctacgacttgctcgagccaaagatgaaatcttgcctcctcttctgtgccttgtttcctgaagattactccatagaagtagctgatctcgtgaggtactggactgccgaaggattcattgatgaaacacaaaaccatgggtacttaatgaaccaaggaatcactttggtagagaatctgaaagactcttgcttacttgaagagggtgctcatggtgaaacagttaagatgcatgatgtggttcgtgattttgccatatgggtgatgtcttcctcacgagatggtagtcactctcttgttatgtctggtataggcttgtgcgagtttccacatgagaagtttgttccttctatccgtagagtttctttaatgaacaataagcttaaaaagatcccgagtaaggtgttggagtgtgttgaactctcagctttgctgctacagggaaactttcacctggaggagttgcctgtgggattcttgatatcttttccagcacttcgggttttgaatctaagtgggacatgcataaggtcgttgcccaactccctgagcaagcttcatgagctccgatctctcatcttgagagactgcttctatcttgaagaagttccttcccttgaaggccttacaaaaattcaagttctggatctttgtgccactcgaataagggaaactccaagagggttggaaactttgaagagcttgagactacttgacctctcccgtacacatcacctcgaaagcattccagcaggaatcatcccacagttatcaagcttagaggttctagacatgacccttagtcatttccactggggcgtccaaggacaaactcaagaggggcaagcaacacttgaagagattgcgtgtctcaaacgtttatcagtcctctcaatcagagtcgtatgtgttccacctctctcccctgattacaattcattgatagaaaggttaaagaagtttcagctgttcatcggcccaacagcaaactctttaccttctagacatgataagcggagagtaacaattagtagtctcaatgtttcagaagcattcattggatggttgctaaccaacacaacttctttagtgatgaaccattgctggggtctcaatgagatgctggagaacttggtaatcgatagcacgagtagcttcaacatgttaagatctctaacggtagagggttttggtggaagtataagacccgctggtggatgtgtcgcacagctggatcttctacctaacctcgaagaacttcatctgcgtcgtgtaaatctgggaaccattagagagctcgttggtcatctggggttaagatttgagacactaaaacatcttgaagtcagcagatgtagccggctcaaatgccttctctccttagggaacttcatctgtttcctgccgaacctacaagagatacatgttagcttttgtgaaatgcttcaggagctgttcaactattctccaggagaagttccaacctctgcttctgtggtacctgctctgcgtgtcataaagctaaggaatcttccgcggttgaagagcttatgtagccaaaaagagtcatggggatgtttggaacatgtggaagtgataagttgcaatcttctaaagaatctacccattagctcaaataacgctcacagagtcagagaagtaagaggagaaacacactggtggaacaacttaacttgggatgataaaactacaatagaaacccttcaacctcgtttcgtaccagctgatgggaatatacctactgcctctcttggaatctcttgttatcagagcttcaacacaattgaagaagcttctccaattcctagtagatcaggatctcaggctgaggagcttatgtag

SEQ ID NO: 210 - DNA, 2892 bp, Glycine max
  source 1..2892: mol_type = genomic DNA
atgataatgtacaagtgctagaaatgaaactagaagagttatgcagcctagaatatgacataaacaaagagcttgaaattgcagagctacagcaaggcaagaaaagaaaacgagaagttgaaaattggcagagaaatgttcaaaggaagaaaattgaagtctatggcatagttcaggaattgagggactgtggagtgtttaagcatctaaagttaactgcacaagtaaagaaactaataggacaagtgacagatcttgtggagcgtggtaggtttcctaaaggaattgtggggtgtgcacatgaatctagaggatatgcattgttgacaacaaaattagcaggtgcaatgtttcagaaaaatgttgctaagatatgggattggttgatgaatgatggtgagttgataattggtgtgtatggaatgggaggagtggggaaaactagtatgctaatgcacatacataatatgcttttaacaagagtcaccaactttgatagtgtgttttgggtgactctctcacagtcatttagcattcacaaattgcagtgtgatgtagccaaaatagttgggctagatatttcaaaagaaagtgatgaaaggaaaagagcagcaagattatcatggacattgatgagaaggaaaagatgtgtactttttttggatgatgtgtggagttattttccactagagaaggtgggaattcctgtgagggaagggctaaagttggttttgacaagtcgttcattagaagtgtgtcgaaggatgaattgtcaaaacaatgtcaaagtggagcctcttgctaaggaagaagcatggaccttgtttctagataaccttggacaacagactactctttctccagaagtaacaaaggttgctaggtctgtcgcaaaagaatgtgctggtttaccccttgcaattattacaatggccaggagcatgaggggagtggaagaaatttgtgagtggcggcatgctctggaagaactaagaaacacagaaattaggctggaagaaatggaaatggaggtactccgtgtgttgcgatttagctatgatcacttaaatgataacatgctacaaaagtgcttcttatgttgtgcattatatcctgaagactttgaaatagacagggatgttttgatagaaagttttgttgatgagggactggtgaatggaatgaaaagtttggaggctatgtttgatgaaggacaaaccatactgaataagcttgaaaacagttgtcttttggggaaagtggaaaattatgttggtggaaaaaaatgcatggggttacaggatgccagcagtcatatagctatcagcatgatgaaaaggggatgccaatgtgtggcaccaatagataatgtggaaggctattatgtgggaagtcaattggtgaaaatgcatgatttggtgagggctatggctattaatgttataaaggtgaactaccattttcttgtgaaggctgggttgcaattgactgagattccagatgaagtagaatggaacgaagacctggagaaggtttctctgatgtgtaattggatacatgaaattccaacaggcatatcacctaggtgtcctaaacttagaaccttgatcttgaagcataatgaatccctgacaagtatctcagattctttttttgttcacatgtcttcactccaagttcttgatttgtccttcacagacattgaggttttgccaaaatctgtggctgacttgaataccctcactgctttgttgctaacatcttgtaagaggttgaagcacatgccttcgctagcaaagctgcagaccttaataagattggacctatcttttactgcgatcacagaaatacctcaagatttggaaacgttggtcaaccttaaatggcttaatctttatgcaaaaaatttggtgtcaacaggaaaagaaatagcaaaattgattcacctgcagtttctgattcttcattggtggtccagaaagataaaagtgaaagtagaacacatatcatgcctgggaaagttggaaacatttgctggtaacttatacaacatgcagcatttcaatgcctatgtgaaaacaatgcatgaatatggacctagaagttaccttcttcagttagacagtgaagagtctcctggtaaatctccatggtacttttttgctgaagtttgtttcagcaaggatgtgatcatttcaaactgcaaaatcagaacaggagtaacaccccttatgctcccttcagacattcaacgcttgaaggttgaaagatgtcatgacataagaagcttatgtgatattttgtcattaaaaaatgccacttctttgaagcgctgtgagattgctgactgtgatggccaagagtacttgttttctttatgttgctcttcctcctgctgcacctctcttcacaacatagaatctgtggaactctattacctgaaaaacttgcacactctttgcaaggaaaacgaagctgtggctcaaacccttccacctccaggagcttttacttgtctcaagtatttttgcatctaccattgtcccattatcaagaagttgctgacaccaggattgctagcctatctacagaacttggaagagataattgttcataattgcaagtcaatggaggaaataatttcagtagatggcatagattatgaaagctctggtggtaacaaatattgtgtggctaatagagatgctgttaaagtcacacatccaaagttagtatcattatcattgaagcacctaccagaactcaggagcatatgtagaggactaatgatatgcgagtctctacaaaactttaggatctttaaatgccctaaactaataaggctccctgaaactgctaccccagttcagactttgtacgattgtttctgac

SEQ ID NO: 211 - DNA, 2853 bp, Helianthus annuus; identical to SEQ ID NO: 189
  source 1..2853: mol_type = genomic DNA

SEQ ID NO: 212 - DNA, 2862 bp, Lactuca sativa
  source 1..2862: mol_type = genomic DNA
atggaagagctaattagtaaagaaaacgatttaaaagcagaaataagtattgctttagtgaaccaaagaaagaagctcagaagcgagacacaattgtggcttaaaaatgttgagaacctcatagctgaggttaagaacatagaaactgaaatcatccaaaacaagagatgtataaaagaatgtttccctaattatcgttcaagatacagactaagcaaaaagatgatgaaaagaatcaatgatatgcgtgagcttcatgctaaaggagtattctcaaacgggctatttgttgattcttttccaaatcctgggagaatcctaccaacaagtggtttagtgggtgataaaacatttcaaagtgtttcaaaggtgatttgggaagtattaggtgatgtaaatactagtaagcttggtgttcatggaatggggggtgttggcaagacatctgttatgatgcatatttataaccagctaatcgattgtaaggtttttgataaggtgatttgggttaatgtttcaaaaacccttaatgtggagaaattgcaacttgatattgcaaatgctatcaatttggaactctcagaagaagaaaatgtgatatggagatcaacaagattgcttgaacatctacaagggaaaaagtttgttctcatcttagatgacatgtggcaccatttctccttagaagaggtaggcatcccacatccaaccactgacaatggttgcaaatttgtaattataactcgccttatggaagtttgtcgtggaatggaaactcaaagggaaatcaaggttgaactcttgtccaaaaacgaagcatgggatctattcacaaccaaatcaggtccaatttgtgaagaaatagaatctattgcaaaatcagtgtgtgaaaattgtgggagattgccacttgcaatcatcacagtgggacgtgccatgaggaaaattgaagataaaagactttggaagaatgcacttgaagaattagagtcctcaagagcagaaatttcaggtatggaagaagatgtgtttgctagactcaagtttagttatcttcacttaaaagatgaccacatccaagcttgttttctgtattgtgcattgtaccctgaagatcataagatcaaagcttctgaacttatagagtactggatggcagaagagttgattactgaagtaggtgatcgagaaaaggaaatcaacaagggttacacagtgctaaaaaagctcaaagatgcttgcttgttggaagacataggatccgatcatgtcaagatgcatgatttagtaagagacatggctatcagaattgctagagaaagtccaaggttgattactaaagctcaaatgaaattaaaccgaatgaaaagagaatggattgaaaacgttgagtgggtgtctttaatggacaacaatattaccatttttcctgataatcccaactgccaaaaactatctactttgcttcttcaaagaaaccctcttcctgaaaagattcaagattcgttctttatgaagatgcagtgtcttaaagcacttgatctctctggaactggaataaaatcactaccagagtctgtttcaagtttatgtaatctccgtgcactttttttaagcttcagtaagatcaaggagcttccttcattaaccatgttgaaggagttaagggtgttggacttatcacatagccgtttgagaaagctaccacatgatatagaaaatttaaacaatttgaggcgtttagatttgtcttacactgaaaaactacaaacattcccatctggtgctatccaaaagctttcttgtctagaaaacttttccatgttcaaaagcaactggaggtggtcagcaaatagagatggatttgaatcatttgatgaaatttcaagattgtcacggttgaccagtcttggactttcctttgaggacaaaaccagcttcattggctatgtgaaatccaaacaatggttggttcttgaaagttatcatcttggaataggtcagttaaacattttgctacccactgttgaaggaatgcgtagcattgaaattcaagattgtaacctttgtcatcaagacaaaatgattgagcttccaaacaatatccaacaattggcactccacagttgtcatgatattactattttatcagagctttccgacacaaccaacttggaaaatctgagacaatgttacatctcaaactgtaatggcatggagttcatcacaaaagcagataacttttttccaaatcttgaactacttgtcctacgaaagctgccaaagttgaaagcaatatgtaatggtattacatcgagtcagattttcacaaaggtgaagagcctacagatccacagctgcaatagaatgaagtctttgttttcatctcatatgctacaagacttccagaaccttgaagagattgaggtgtggaactcaagattgattgaagaaatggtggaagaagaacaaagtggagggaatatcagtagcttttcaacagttttacttccaaagcttcgccgattgtccttgtccatgttaccagaattgaaatacatcacaagaagggttttgatttgtgattctcttgaaacagttgagatttgggattgtgaggttttgagggctcttccattctctattagctacttgccatcatctcttaagaacattaagggaaacataaattggtgggatcagttagaatgggatgacactagttgcaagaatcttctgcaaccattctttgaccaaggtacataaatcttctgcaactaactagtgacaactttctgcattagttgcaagatctggacttaatagggcgttgagaagtcggctacatcacaagacacaaat

SEQ ID NO: 213 - DNA, 2667 bp, Nicotiana tabacum
  source 1..2667: mol_type = genomic DNA
atggtttttcacagagacaaaaaaagatggtctctcttgacctctttgcttaacaacacttatcatcggagacaaaacaaaagttttaaggggaaatttggagattttgtgaccaaaatggaagcaaatgaagcaggggagtcatttttcacaacaaagctatttggtcaagaaaccaagagaacgtgtgaaagaatttggagatgcttaaagaaagacaaagttacaagcattggtatatatggagttaaaggggttggaaaaacaaccttagccaagctaataaatcatcttctccaacaaaaaactcaataccaagttttttggataaacatttctcaagaaagcagcatcagggaattacaaagtgatattgctgcagcaattggattggatcttttagaggaagaagatgaagagaagagagcgacagcgttacacgactcgttcaaagggaaaaaagattttgttctaatattggatgatgtattggaagatatacctttaaagatgttaggaaatcctttaaaagttgaagggggaaggttgatagtaacaagttgtttgctcgaaacgtgtcgaaaaatgggatgtcaaaggaaatttggagtgaaaaaactagaagaagaagaatcttggagcttttttatagaaaaacttggaaatgagaaagtagtaattcatcaagaagtagaaggaatggcgaagtctgtagtaaatagttgtggtggccttccacttaggataattacaatagctaaaagcctaaaagggttggaattggatggtgttaatcaatggaaaaaggccttggaaaatattattcaagaatctttaaaaggggaaaacaatgatgttatagaaatgttgctatatagttttaattgtttgaaggaacaaaacttacaacaatgtttcttgtattgttgtttgtatccagaagatgagaaaattccaaaggataaattgataagtaggttcattttagagggactaatcgatacaaaagagactcgcgaggcagagtttgaggagggatatgagatattgagcagattggaaagtgtttgtttgttggaaaatgccatagataacaaaggtaatcaatgtgtgaaaatgcacaatttgattagagaaatggcactgaggatcactaatgaaaatcccaagtttatggtaaaagctggagttcaattgaatgatgcaccaaaggaagatgaatggctggaaagtttggacaaggcatcgctaatgaggaacgagatagctgaaattccagcaggaacatcagctaagtgtcctaggctgacaaccttgatgttgcagcagaattatcacttgttgaaaattccagattctttcttcgagcacatgaaggcgttacgtgttcttgatttaggttacacttgcattgagaagttgcctgattctgtatcagacttggaaaatctcactgctctcttgcttgcattttgttggaacctaaggtcaatgccaaccttggaaaaactcgaggctttgcaagaattggacttgagtggcactgggattcagactctgccagtagcccttgagactttgttgaacctcaaatgccttaatttgcatgcaatgcgttggctcgagaaaataccaattgggatattgcctcaaatctcctctctccaatgcctagtgttatcgcatcatatagacgtagaaggtgaggaactagaggagctaaaagagttggaagaatttcaaggtaggttctctaatgttcaagatttcaaccaattcattaatgctcaagaaaatgagggatgtcttaggttttatagaatattagtaggtcaatatgatggtttaggaccaatgacacaaatccaattcaatcataacagattttctgataaattagtcaagtgttatggacttgggaaagaagatgaagtgttattgcttccacaggatattgagcatttgaaaattgagagctgcaataacttcagtggctgtctttcagaacatttgccccgtctttatgattctaaagatttaaagtacttcaaagttcgttggtgcaacaaactggagtacctcatgaggatagaagtgagcgaagaatctgtcatatttcattctctcgagcatcttgatcttcttgaattgcatagttttgttggtatatttgatgactggaaaacaagtttaagagcttcaatttcagtaagtatcttttcttgccttagaatgatacgaatcgagagatgtcacagtatcaagaagctatttccaattggtttatgctcaaacatgcaaaatcttgagagaatatatgtcctctcctgtagtcaaatagaggaaataattgcagatgaaaatgatggaatcgtcgtccttcctacattgacgaggatttacttatggtctttgcctgaattgaaaagcatatgcaatggaaaaatggattgtaactcaatcaagaaagtgtcaataaaggaatgtggtaagttaaggaaattgcctttctttttttcttcccaagaagaagatgagaaatttaccattccttcaactcttaaagaaattgctatacattcaagtgataaagaatggtgggaatctttggaatgggataatccaaacaccagaaatgagcttcagccctttgttaaatattggtaa

SEQ ID NO: 214 - DNA, 2706 bp, Ocimum basilicum; identical to SEQ ID NO: 192
  source 1..2706: mol_type = genomic DNA

SEQ ID NO: 215 - DNA, 2982 bp, Phaseolus vulgaris; identical to SEQ ID NO: 193
  source 1..2982: mol_type = genomic DNA

SEQ ID NO: 216 - DNA, 2826 bp, Solanum tuberosum
  source 1..2826: mol_type = genomic DNA
atgcaagagaaacttactgtagacaagaggtgtttaaacagatgtttgccaaattatatgtctcgatttaagcaggggaaacacatcaataagaaaattaaagaagttgacaggctcctgggacagagcttatttccagatgctttgttggttgatatgatgcctcggaggggaaagatattgccagcatcctcattagtaggagaatctgctcaaagaagtttggagactgtatgggagtatttgaatgatgaacactctgggataattggtatttatggaatggggggtgtgggtaagacatccatcctcgtagaaatcaataatcgtattttgagagagagcacaatttttgataatgtcatttgggtcacagcatccaacgattcaaatgtccagaaattgcagaaggatattgctagagcaataggtttatcttttgacgatgaagatgatgaaatgacaagagcagctcaattacttgaagcgttgatgcgaagaagtagatttgttttaattatagatgatttgtgggaagcatttcctttggaggttataggaatcccatacccatattatggatatgactgcaagttgataataactactagatccatgatagtttgtcgtggcatggaatcagtgagggaagttgaagttagtgttctttcagaggaagaagcatggaacctctttaaacaaaaggtcggtgaggaggtgctagcatctccaacattacaagctgttgccaaggatgtgtcgaaggagtgtggaggtctcccactagctgttgtaacagttggtcgggctttaagaagagaaaatgatctgaggcaatggaaaaatgcattaagccagctgaaaagtgcaacgggaagaatagaaggcatggagaatcgagtctttgcacgtctgagatttagctatgaaagactgaaggacaatgtgactcgttcatgttttctttattgcacattgtacccagaggatcatcatatcgagaccgaagaactgattaagtactggacatgggaaggcctgttggataatcttgggtacggagaatccaagatgctgcagggaaagatgatattagatgaactgaaacatgcgtgccttctagagatcattggatgtcaagaaggtagtttgaatgaatatgtcaagatgcatgacctcattagggatatggcaatagctgttacaagagagagcccactctttatgatccgagcaggacatgagatgcgtgtcccaccagttgagagtgaatggctcatagggcttgaaagaatctcgttaatgagaaatgatttgaactctttgaatttggaaccgagatgtcctcagttaaccaccttgctattgcagtataattcactgaccaagggagtacatccttctttctttaaccatctaaaaagtctcaaagttctggacttatcttacacgggcatctctgggttgcctgattcactttctaatctcgaaaaccttcatgctttgcttctacgaagttgttggaacttgcatcacgtgccaacaatggaaaggctaaaggagctgagggttttagatctctcttctacatcgattgagtgtgcgcccccggggatggaaatgttactcaatttgaagcatctggatctctcccacactacacttcatgaatttgatattcaaattttaggaacatacagatttctggagagtctcttaactattggtctatggcaacctctaatgctcggtccagattttgttgatgttgtgaaacgctgcaccatcttgacaacccttgaagccaatttcagcaacttgcaggacttcaactattatgcctcatcagatcactggaacacacttgagagtttcaaattttgtgtaggctatccccaatcctctaaactacccggaaaaaatagcgtaggattctttgggactcacattgttgaaacagaagcctcttcttggttgccaggtatacttgagttggtcattcatgaatgttctggaatcactcacttacctatgtttattgtgaacgcttcctccgacctgaaacgttgcaaaataaagtactgtgatgagatggagtggattataactcccgagtggggcacatttcctaatttagagttgctagagattgagggcctgagcagactgcagaatatatgtaaggggattccaccaacaggcactctttcaaaccttaaggtgttgaatgttattgcttgtgataatctcatgactctgttaccacttgagttagtgcagcatctcaaaaacctcgaagagctcgagttggaacactgttcgatgctggaggagatcatagtcactgaagcggaaaatgaagagatcattcaagagaacaacggtgaagtggtcctcccaagtttgcaaaaattaagattagtttctataccaagactgagaagcatatgcagaggtccaatgatttgtgattcgttaacgactatagaagtcgtagattgtccagagctggaaatacttcccttctttttggaaacaaggcagcaactagctgactttctcaaacagataaaaggaagcagaagttggtggtggaggttaaagaggaagcatcctaccgcgacatcccttcttgctccactccttagacccgaaagggagtattcttttgctgctgatgaacatagttacattctcagctctggaaattcttctttgggccacgataacattcttacagtggaagtggaggtcgggctcatattgaaaatcctgtatcccatttgtctttgctgtatagtggctgcttcgcggataagaacatga

SEQ ID NO: 217 - DNA, 3051 bp, Vitis vinifera
  source 1..3051: mol_type = genomic DNA
atggagtacgtggaagcagtgctaacaagcattgggctattgaaggatatgtggccctccatttctaagtgcttcaactatcacaaaattcttgataagaattgcagaactctcaaagagaaaatggagagattgaagagtcgtgaacaagatgtcaaaattgaattacaaaatgcacaatatcagcgaaagaaagaaaaaaaagaagttgaaaattggttgaaagaagtgcaaaatatgaaagatgatctggaaaggatggaacaagaagttggaaaaggaagaattttctcaagattggggtttctaaggcagtctgaagagcatatagaaaaagtagatgagctacttgaacgcggtagatttcctgaagggattttgattgatgtacttcgagatgaaggaagggcattgttaacaacacaactaataggtgaaactacaaccaaaagaaatttagagaagatctggacatgcttagagaaaggtgaaatccaaagcattggagtttggggaatgggggggatcggcaaaacaactattgttactcatattcacaatctcctcttggaaaaaaaggatactttcggccttgtctattgggtgactgtatcaaaagattcaagtgttcgcaagttacaagatgtcattgctgagaaaataaatttagatttatcaaaagaagaagatgaaaggttaagatctgctttattatttgaagcattgcagaaagaaaagaaatttgtgcttatatttgatgatgtgtgggaggtttatccaccacgggaggttggaattccaattggagttgatagaggaaaactcataataaccaccagatcaagagaagtgtgcctaaaaatggggtgcaaggaaatcatcaaagtggaacctctttatgaggaagaagcgtgggagcttttcaacaaaacacttgagcggtacaatgcacttagccaaaaagaagaaaaaatagccaaggacattgtcagggaatgtgcaggtttacctcttgccatcgtcacaacagctagaagtatgagtgttgcatatgacattgctgaatggaggaatgcattgaatgaattgagggaacatgttaaagggcacacaattaacatggaaaatgatgtatttaaaatattggaattcagctacaatcgcttgaatgatgaaaaacttcaagaatgtttgttgtactgtgcattgtttcccgaagattataagattagaagggtgttgttgatcagatattggattgctgaggggcttatagaagaaatgggaagtaggcaagcagagcgtgatagagggcatgctatactgaataaacttgaaaatgtgtgtttgttggaaaaatgtgagaatggaaaatgtgtaaagatgcatgatgtgatcagggacatggctatcaatataacaagaaagaattctcgattcatggtgaaaactagaagaaatctggaagatctgccaaacgagatagagtggtcaaataatgtagaaagagtttcactaatggatagccatctttcaactttgatgtttgtaccaaattgccctaagctttccacattgtttcttcaaaaacccaagttttcttatccacctaaaggtctacatgaaggtcttccaaattccttctttgtgcacatgctgagccttagagttctggacctgtcatgcacaaacattgcattgctaccagattctatctatgacatggtgaatcttcgagctctaattctttgtgaatgtcgagaattaaagcaagtaggttcattagcaaagcttaaggaattgagagagttggatctcagttggaatgaaatggaaacaatacctaatgggatagaggaattggtcctcctcaaacatttcagttggatctcataccattcacgccagacaatacttcccaatcctctttccaaacttcttcccaatcttcttcaactacagtgtctaagacatgatggtgagaaatttctggatgtaggagtggaggagttgagtgggttgagaaagttggaggtccttgatgtcaatttctccagcctacacaatttcaatagctacatgaagacacaacactaccggagacttactcactatcgtgttcgattaagtggaagggaatattctaggcttctagggtcgcaaagaaatcgacatggtttttgtaaagaagtagaagtgtgggaatgtaagctgacagaaggagggaaagacaatgatgactaccaacttgtgctccctaccaatgtccagtttttgcagatatatacatgtaatgatcccactagcctattggatgtttctccatctctcaagattgccaccgatttaaaagcatgtttgatatcaaaatgcgaggggataaaatacttgtggtgggtagaggactgcattgactcattaaactcattgtttcttgatttattgccaaacttaagggttctcttcaagttgaaaccaacagacaatgtacgttgttccagtctcaagcacttgtacgtgagtaaatgccacaatctaaagcacttgctcacgcttgagttagtgaagaaccacctccaaaaccttcaaaacatctatgtccgtagttgcagtcaaatggaggatataatagtaggagtagaagaagaagatataaatgaaaagaataatcccattctctgttttcccaactttcgatgtttggagttggttgatctaccaaaactaaagggcatatggaagggaacaatgacttgtgattcccttcaacaccttttagtattgaaatgtcgaaatcttaaaaggctcccttttgcggtttcggtgcacataaacgatggtaatggccaaagaagagcttcaacaccacccctcaagcaaatcggaggagacaaagaatggtgggatggggtggaatgggacacacatcctcatgccaaatctgtttttcaacccctatttgtacaaggaaaaggtttcagatggctaaaaaacaattgggtcacaagtcgttggagagagactgtggacaatatatttgaagaagtgtaa

SEQ ID NO: 218 - DNA, 2727 bp, Zea mays
  source 1..2727: mol_type = genomic DNA
atggaattcgtggcgtccattgtcgacacggtgttccggccgctcaaggactacttcgcgcggaccgtcggctacgtcatgtcctgcggcgactacatcgacgcgatgggcaacgagatgaacgagctcaagagcaagcgcgacgacgtcaagcgcatggtcgacgccgccgagcgccagggcatggaggccaccagccaggtcaagtggtggctagagtgcgtcgccctgctcgaggacgccgccgcgcggatcgtcgacgagtaccaggcgcgcctgcagctccctcccgaccagccccccggctacaaggccacctaccacctcagcaagaaggccgacgaggctcgcgaagaggccgcgggcctcaaggacaaggccgacttccacaaggtcgccgacgaactcgtccaggtccgcttcgaggagatgccgagcgcgccggtcctcggcagggacgcgctactccacgagctccacgcctgcgtccgggacggcgacgtgggcatcgttggcatctacggcatggcgggggtcggcaagaccgcgctgctcaacaagttcaacaacgacttcctcatcaactcccacgacgtcaatgtcgccatctacatcgaggtcggcaaggacttcgatctcaacgacatccagaggatcatcggcgaccggctcggcgtgtcatgggagaaccggacgctcaaggagcgcgccggtgtgctctacagagtgctcagcaagatgaacttcgtgctgctgctggacgacgtttgggagccactcaatttccggatgcttggcatcccggtgcccaagcacaactcccagagcaagatcgtcttgacgaccaggatcgaggatgtgtgcgaccgcatggacgtccgccgcaagctcaagatggagtgccttccctgggagccctcgtgggagctcttccgtgagaaggttggcgaccacctgatgagcgctagccctgagatccggcaccaagcgcaggcgctggccatgaagtgcggcgggctgcccctcgctatcatcactgttggccgggcgatggccagcaagcgcactgcaaaagagtggaagcacgccatcactgtgctaaagattgccccatggcagctccttggcatggagtttgatgttcttgagcctctcaagaagagttatgataacctgcccagtgacaagttaaggctctgcctgctatattgctcattgttcccagaggagttctctatttccaaggattggatcataggctactgcatcggtgaaggtttcatagacgacttgtatactgagatggatgaaatatacaacaaggggcatgaccttcttggtgatctcaagattgcctctttgctggagaaaggtgaagatgaggatcatatcaagatgcaccctatggttcgtgccatggctctgtggattgcatcagatttcggcaccaaggagaccaaatggcttgtccgtgctggagttgggctgaaggaggcaccaggcgcagagaaatggaacgatgctgagcggatttctttcatgcggaacaacattcttgagttgtatgagaggcctaactgccccttactgaagacattgatgctgcaaggaaatcctgggctggacaagatatgtgatggattcttccaatacatgccatctctcagagtgttagatctgtctcatacctctatcagcgaattgccttcagggatcagttcattggttgagttgcagtacctggatttgtataacacaaacatcaggtcacttccaagggagctaggatctctatcgactctgcggttcttgcttctctcgcatatgccgctggaaacgatcccaggtggtgttatatgcagcctcacaatgctgcaagttctgtacatggacctcagctatggagattggaaggttggtgcaagtgggaatggtgttgattttcaggagcttgagagcctgcgtaggctcaaggcgctggacatcacaatacaatctgttgaggctctggagcggctgtcacggtcatatcgcctcgctggttccacaagaaacctactgataaagacatgctcgagcctgacaaagatagagcttccttccagcaacctgtggaagaacatgactaacctgaagagggtgtggattgtcagctgcggcaacttagctgaggtaatcatcgatagcagcaaagaagctgtgaatagcaatgcgcttccccgttccatcttgcaagctcgggcggaacttgtcgacgaagagcagcctatccttccaaccctgcacgatatcatccttcagggactgtacaaggtaaagatcgtctacaaaggcgggtgtgtacagaatctagcatcactgttcatctggtattgccatgggctggaagagctgattactgttagtgaagaacaagacatggcggcaagcggtggcggaggacaaggttcggcagcgtttagagtcatcacacccttccccaacctcaaggaactgtacctccatggcttggcaaagttcaggaggctcagcagcagcacatgtacactgcacttccccgcgctggagagcctgaaagttatcgagtgcccgaatttgaagaagctgaaactctcagctgggggactcaacgtgatacaatgcaacagggaatggtgggatgggcttgagtgggatgatgaggaagtcaaagcttcttatgagccattgttccgcccattgcactga

SEQ ID NO: 219 - protein, 827 aa, Beta vulgaris
MMNAIFTKFFRIELFWRDLRCDGGRIDTRVETVVNNQSELGTGHIQQENKRRRLVQPSLCFNSECVDRIISWLDNDEVDTIGVYGMCGVGKTTLATQLETRLLNHDIRFSASHDVAGVSVGVNCSVYKLQQDIAGAFGIDLQGDEDKTRRASMIEAFFSRRDKCVLILDDLWGDFRRKDVGIPKECKLVLISQSLDVCRVLGCEKVLKVEPLSEGKTWKLFNHSIGGGVLNNEDVCRIRKLVYDKCAGLPLAIVELAKRLRKMVDDNGFSWREVLEGTNPFSSRSMHLEDTFSHLKLSYERLSDIKLQQCFLYSAIYPKGHAISREELIRVWIGEKLIDDISSLLAQYDKGHSILNKLINSCLLEACEDYKGCIKIHEVVRHMALSIAGDSFMIEAGVPSKFEFRENVRVVSLINSLISPIPSGASSKYHTLSTLLLQHNPLELIPESLFLQMRALRVLNLSDTRLIRLPSSIGALEELRVLDLSFCQNLKQVAALSKLLKLQFLNLSQTTIEKVPCSLEKLKRLTELNLSSIPEPTKIPSVVLLALCRLKKLTCHVIGTIHELQRMNSLEILDARFFSLCDLSAYVRSQHWCILESYSLQLGCEVQAEQPYIRRVSLQGFSLTGQEQYIVLPSNIQELYVDNCRGFRRLSDVMYPVAYQHKSCQNYEVFSSLEICVISRCPDVETLFAANWVENLQSLELLQVEDCGQLKEVITEEFVERGVYPEGISAPINLLQIRQLIFTRLPQMESIYKGQLVCASLLSCTFLDCPKLTRLPFSCMGNGEETFPWRLEWIEGEKKWWEMLEWDQPGSEALFKPLFRCKSLDDQ

SEQ ID NO: 220 - protein, 1016 aa, Brassica napus
MDCLGSFLGSFLAEAGRGICRSTYTRAIYTIRFKSNIKALNNALSGLIDVQTKVEKDLKTLETKGKSLHGPLRTWLRDVKEIVSEANSILEGRVSCALSLRCKRSKKLVVVLDKVKKLHKLGVELLDIFSLEGRSVLVERILGPSIADQTVASKMLVKVRSCLMRDGVQKIGIWGMGGVGKTTLVRELNNKLWKEADTQPFGMVIWVTVSKEFELGRVQRQIAERLDVEIRLGESEERLASRIYGRLEQVSSFLLILDDVWKPIDLDQLGIPHTNEHKSTKIVLTSRFLEVCQSIKTDIDFRVNYLCEEEAWELFCKNAGEVTRLDRVRPIAKKVSRECGGLPLAIITVGMAMRGKKKVELWKHALKELKSAVPYVKSIEEKIYQPLKLSYDRLQPKMKSCFLFCALFPEDYSIEVSELVRYWIAEGFIDETQNYSYLMNQGITLVENLKDSCLLEEGAHGDTVKMHDVVRDFAIWVMSSSRDDSHSLVMSGIGLCEFPHEKFVPSIRRVSLMNNKLTRLSNQLPNQVVKCVELSALLLQGNFHLKELPEGFLISFPALRILNLSGTCIRSLPNSLNKLHELRSLILRDCYYLEEVPSLLGLAKIQILDLCATRIRETPRGLETLNSLRLLDLSRTHHLESIPAEIIPKLSNLEVLDMTLSHFHWGVQGQTQEGQATLEEIARLQRLSVLSIRVVCVPPLSPDYNSWIERLKKFQLFIGPTANSLPSRHDKRRVTISSLNVSEAFIGWLLENTTSLVMNHCWGLNEMLENLVIDSTSSFNMLRSLTVEGFGGSIRPAGGCVAQLDLLPNLEELHLRRVNLGTIRELVGHLGLRFETLKHLEISRCSQLKCLLSFGNFICFLPNLQEIHVSFCERLQELFDYFPGEVPTSASVVPALRVIKLRNLPRLRRLCSQEESWGCLEHVEVISCNLLRNLPISANDAHGVKEVRGETHWWNNLTWDDNTTRETLQPRFIAAGNIPTGSLGMSCYQSSNTIEEASPISTLPESQAEELPVATM

SEQ ID NO: 221 - protein, 1009 aa, Brassica oleracea
MDCLGSALGSFLAEAGRGICRSTYTRATYTIRFKSNINALKNVVNGLVEVQNKVEKDLKTLEIKGKSLHVQLRRWLRDVEEIVSEANSIQEGRVSCALSLRCKRGKKLVVVLDKVNKLQKLGVELLDIFSLEGRSVLVERIIGPSIADQTVASKMLVKVRSCLMRDGVQKIGIWGMGGVGKTTLVRELNNKLWKEADTQPFGMVIWVTVSKEFELGRVQKQIAERLDVEIRLGESEERLASRIYGRLEQVSSFLLILDDVWKPIDLDQLGIPEHKSTKIVLTSRFLEVCQSIKTDIDFRVNYLCEEEAWELFCKNAGEVTRLDRVRPIAKNVSRECGGLPLAIITVGIAMRGKKKVELWKHALKELKSAVPYVKSIEEKIYQPLKLSYDRLQPKMKSCFLFCALFPEDYSIEVSELVRYWIAEGFIDETQNYSYLMNQGITLVENLKDSCLLEEGAHVDTVKMHDVVRDFAIWVMSSSQDDSHSLVMSGIGLCEFPHEKFVPSIRRVSLMNNKLKRLSNQVVKCVELSALLLQGNFHLKELPEGFLISFPALRILNLSGTCIRSLPNSLNKLHELRSLILRDCYYLEEVPSLLGLAKIQILDLCATRIRETPRGLETLNSLRLLDLSRTHHLESIPAGIIPQLSNLEVLDMTLSHFHWGVQGQTQEGQATLEEIARLQRLSVLSIRVVCVPPLSPDYNSWIERLKKFQLFIGPTANSLPSRHDKRRVTISSLNVSEAFIGWLLENTTSLVMNHCWGLNEMLENLVIDSTSSFNMLRSLTVEGFGGSIRPAGGCVAQLDLLPNLEELHLRRVNLGTIRELVGHLGLRFETLKHLEISRCSQLKCLLSFGNFICFLPNLQEIHVSFCERLQELFDYFPGEVPTSASVVPALRVIKLRNLPRLRRLCSQEESWGCLEHVEVISCNLLRNLPISANDAHGVKEVRGETHWWNNLTWDDNTTRETLQPRFIAAGNIPTGSLGMSCYQSSNTIEEASPISTLQESQAEELPVATM

SEQ ID NO: 222 - protein, 974 aa, Capsicum annuum
MDTFIEKVVDFGVKKFKSISDFDENLETLERYVKQLLDKALDVKTEVDNREKSGRRKRKREVESWFHEVTKIEEELRALKEVVTRGKKNGGVLEKMNGRVGELLEQSKHFGTLVHDMYEPEECPLLASQFNDKISKQNLEVIWTWLQDENVSSIGIYGMGGVGKTTLVKHIHNRLVKEIHYQVCWVTVSQGFTIKGLQYELAKILKLDLSDEVDEHRRAAKLNWAFKNRKKIVIILDDVWDRLCLEKLGYSLGMEGCRLILTSRSSEVCLKIGCQKLREVKNLNSDDAWELFRKSLGCETLVSPDIEPIAKSLAGRCKGLPLGLITLGGSMRGVTDIREWKNALKEFPDDMESDVFKVLQYSYDRLRDTNMQECFLYCALYPEDCEIGRDELIGRYMMEGMMKGDSREEEFNHGHTILNKLVKICLLEATSEGVRMHDLLREMALRITNVKPRYMVRAGIGSQVPEEQDWIFDLDKVSFLKSYIRGIPEDMAPNCPSLSSLLFSDCTLRWIPESFFQHMNNLQVLDLSYNSVLMDLPSCFSNLRSLRALSLRQCDQLRYVPPLGKLKNLRVLDVSHTGIKEVPQGMENLFKLKFLDMSGIGLDELPKEILRKLSHLQYLKLPLRVNAKIEDLSSLELLEEFKGRFCDLHNFNKFMRNRRNCEKDWWYDIRVMPKVSSAQCFLHHDSGNRRVEQRKVILQSFSLEADGGVPASIILPHCVQNLHIENCRGLRSCLVDSFQLQATLRGLSCVIKHCDDIEWIVNVPDGRNTITKTDCICFHSLTVRYLRNLVGVCKGKIASHTFSGLTELCFSHCNRMKKLFPWAIVQDLKNLQVLWVQYCDEIEEIIGREEEGSSQSSNPQITSTTADLPKLKRLHLSVLPELKRICDGKLICDSLESMDFKWCPNLKRLPFFTPNTNGHPLPSLKRIEVKKSWWERLEWDQSHIKTLLQPYLIADDDEKLEGNQYHVKNHFRPY

SEQ ID NO: 223 - protein, 863 aa, Chenopodium quinoa
MHLQIQNPLKMISMIYKMFGIGRHYRGVPCDGGTNNSGVENQSELRSSVMDEFQSESRSSVYLQQPEIKRRKVEVSLSLNTKYVNRIIDWLKDDKIVSIGVYGMAGVGKTTLAKQLEFRLRYETPFTDVYAVGMVSVGVDFNVYQLQQKIAGAFRLDLGGDRDETRRAAKIHSFLSRNDKCVLILDDLWDEFRYEDVGIPRKCKLIAISRSRDVCRMLHCRKFVLVEPLSEEESWELFHQSIGGEYLDSKQESHFRKLVCDKCSGLPLAITGLARCFRKMVDDNLSSWREVLEGAKFPFTRQDYLEDAFSRLKFSYEKLNNITLQRCFLYSALYPKGFDIRREELIRLWMGEKLIDNVSSLQARYDMGHSILNKLLNSCLLEASEDKRTIKIHDLVRHMALSVAGDSFLVEAGKTSKLEFRKNLLAVSLINSSISPILPDGSQNYSYLSTLLLQHSSFELIPESFFLQMRALRVLNLSATRLLKLPSSIGALEELQFLDLSLCQNLKQVPQVSNLLKLQFLDLSQTAIKQVPRFLEKLEGLTELNLSSILEPKEIPCGVLPALFRLKRLACQIAGAISELQNVKSLEILDARFLSLCDLSNYVRSQHSCQLDRYHLKVGGEVGSDQPYSRKVSLHGCSLTDQEEDYIVLPNNIQELYVDNCRDFPCLSDVLYPVAYPPRTHDDAIIGSCNEELSCLNQQAKHFSSLEVCIISRCQDIKTLFTLSWMESLQSLRLLQVEDCRQVKELIAVEVVDCGPTEGEHAVICLPQLRQLVLILLPQMESIYKGRLVCALLLSCTVMDCPKLKRLPFSRIDAGEESFVPCLERIEGQEKWWDLLVWDQPESKSLLKPLFRCRSLDDKIVYY

SEQ ID NO: 224 - protein, 1353 aa, Citrullus lanatus
MEICAGAIVGPIGEKITNCTVDPVFRQLDYLLHFRSNVNDLRDQGKKLVETRDFVQHSVDSAKSNGDEIEVMVTEWLSISGQFSEDVERFFNEANGRSLRWWNMLSRHRFSRRATKLAMEVVKAIEGGSFERVGFRKPPQQIMTLNNSKKFEAFESRVSILKEIIEALGDANASVIVVHGMGGVGKTTLVEEMARLAMEGKLFDAIAMVTVKQIPNIKRIQGEIADQLGLKFEEEKERVRADRLRRRLEMEKKVLVILDDVWTKLDLEEVGISSHHKGCKILVTSRKDDVFFDDFGTQRNIKINILSKKESRNFFNKMACDSVESSNDTDPEMEALATELADECGGLPLSLATVGQALKGKGRPSWNDALQEMKFPDQPNNYGVNKAAYLSLKLSYKSLNRDEARSLFLLCSLFPEDYQINIKYLLMYAMGLGLLNSMSSLAVARWRILSLVDELKTSHLLLDGADSDFVKMHDIVRDTAILIASKTKSKYLVRHGSGESLWPPMDEFKDYTAISLGCSDHSELPEFICPQLRFLLLVGKRTSLRLPENFFAGMQELRVLDLTGLCIQRLPSSIDQLVNLQTLCLDDCVLPDMSLVGELKKLEILSLRASDIIALPRVIGELTNLKMLNLSDCSKLKVIPANLLSRLTGLSELYMDNSFKHWNVGEMEGSINARISELDNLQRLTTLHVHIPNPTILPNASLFRKLSGYRILIGDGWDWSGKYATSKTLKLKLDRSIQREDAIQALLENTEDLYLDELESVKNILFSLDHKGFPKLKSLRVNNNVEIVSVVNSDNMQHPHSAFPLLESLFLKNLAELGSICRGRLPQMSFRNLKRVKVESCNRLKFVFPSFMGRGLIHLQKLEISECGVMETIVSKSNETEMQINGDKWDEKNMIEFPELRSLILQHLPALMGFYSHDCISVPSTKMDSHQTISTIEPSYRPLLNQQVSFPKLETLKLHALNSGKIWQDKLASSFYGVKTITSLTVEGCASIKYLMTITVAKSLVKLERLEINNCKLMKAIIISEDQDRDNNYPSKSHLQEDVFPSLESVVISRMDALETLWDNEAASGSFTKLKKVDIRHCKKLETIFPNYMLNRVTNLERLNVTDCSSLVEIFQVKMPVINGNQVAAFVANHLKELKLLRLPKLKHIWSSDPHRLLSYPSLQLVHTIQCQSLLNLFPVSIAKDLIRLEELKIQFCGVEEIVAKQGDDGDGDGDASFVLSGLTSLSLWNLFEFKSFYPGRYTLDCPSLASLDVRHCKSFKLMEGTLENSSLSAVEKVEDDQSSLRGKLERRESDALKETSTRKEEITTIVQDVVEAELTELRAQLQALVMGQNQMMERLAQLTTIANETVSK

SEQ ID NO: 225 - protein, 1294 aa, Cucumis melo
MAMCAGAILNPIGEKIANCMVDPVFRQLDYLFHFKTNVNRLKDQGKKLVETRDFVQHSVDSAKTNGDEIEVMVTEWLTIADQFSQDVDRFFIEANGRSLRWWNMFSRHRFSRRATKLAGVVDEAIQGGGFERVGFRKPPQEIMTLRNKFEAFESRVLILKEIIEALGDANARVIVVHGMAGVGKTTLVEEIARLAKEGKLFDAIAMVTVKQTPNIKKIQGEIADQLGLKFEEEKDRIRADRLRRRLEMEKKVLLVLDDVWSKLDLEAVGISSHHKGCKILATSRKDDVFFNDFGNQKNIYINILSKKEARDFFNKVACDSVESSDDTDPEMEAVAIELADECGGLPLSLATVGQALKGKGLPSWNDALQGMKFPGEPSNYGVNKVAYLSLKVSYKSLNTDEARSLFLLCSLFPEDYQINIKYLLMYAMGLGLLNAMSSLAMAKWRILSLVDELKTSHLLLDGADSDFVKMHDIVRDTAILIASKMKSKYLVRHGAGESLWPPMDEFKDYTAISLDCSDHSELPEFICPQLRFLLLVGKRTSLRLPEKFFAGMQELRVLDLTGLCIQRLPPSIDQLVNLQTLCLDDCVLPDMSIVGELKKLEILSLRASDIIALPRVIGELTNLKMLNLSDCSKLKVIPGNLLSRLTGLSELYMDNSFKHWNVGQVEGYVNARISELDKLPRLTTLHVHIPNPTILPNASVFRKLSGYRILIGDGWDWSGNYETSRTLKLKLDSSIQREDAIQALLENIEDLYLDELESVKNILFSLGYEGFPKLKCLRVKNNGEIVTVVNSDTMHHPHSAFPLLESLFLKNLAELGSICRGKLPQMSFRNLKRVKVESCDRLKFVFPSFMVRGLIHLQSLEISECGIIETIVSKSKETEMQINGDKWDKNMIEFPELRSLVLQHLPALMGFYCHDCITVPSTKVDSRQTIFTIEPSFLPLLSQQVSFPKLETLKLHALESGKIWQDQLPSSFYGVKNLTSLSLEGCASVKYLMTITVAKSLVNLERLELNDCKLMKAIIISEDQDLDNNYPSKSILQSKDVFPNLESLLISRMDALETLWVNEAASGSFTKLKKVDIRHCKKLETIFPNYMLNRMTNLERLNVTDCSSLVEIFQVKKIPVINANQVTAVGANHLKELKLLRLPKLKHIWSSDPHKFLSYPSLQLVHTIHCQSLLNLFPVSIAKDLVRLEVLKIQFCGVEEIVAKRGDDGDGDDDASFVLSGLTSLTLWNLFEFKRFYPGRYTLECPSLTALDVRHCKSFKLMEGTLENSSSISSAVEKVFTFSLILICYLASFL

SEQ ID NO: 226 - protein, 1411 aa, Cucumis sativus
MDIISPVVGPIVEYTLKPIGRQLSYLFFIRQHIQNLESQVELLKNTKESVVNKVNEAIRNAEKIESGVQSWLTKVDSIIERSETLLKNLSEQGGLCLNLVQRHQLSRKAVKLAEEVVVIKIEGNFDKVSSPVALSEVESSKAKNSDFVDFESRKPTIDKIIAALMDDNVHTIGVYGMGGVGKTMLVQEISKLAMEQKLFDEVITSTVSQTPDLRRIQGQLGDKLGLRFEQETEEGRALKLLNRLKMERQKILIVLDDVWKQIDLEKIGIPSIEDHSGCKILFTSRDNDVLFNDWRTYKNFEIKFLQEDETWNLFRKMAGEIVETSDFKSIAVEIVRECAHLPIAITTIARALRNKPASIWKDALIQLRNPVFVNIREINKKVYSSLKLSYDYLDSEEAKSLFLLCSMFPEDYIIDCQVLHVYAMGMGLLHGVESVAQARNRITKLVDDLISSSLLLKESNVDLVMYVKMHDIVRDVAIIIASKDDRIFTLSYSKGLLDESWDEKKLVGKHTAVCLNVKGLHNLPQKLMLPKVQLLVFCGTLLGEHELPGTFFEEMKGMRVLEIRSMKMPLLSPSLYSLTNLQSLHLFDCELENIDVICELNKLENLSLKGSHIIQIPATISQLTQLKVLDLSECYALKVIPPNILVNLTKLEELYLLNFDGWESEELNQGRRNASISELSYLSQLCALALHIPSEKVMPKELFSRFFNLEKFEIFIGRKPVGLHKRKFSRVLCLKMETTNSMDKGINMLLKRSERLHLVGSIGARVFPFELNENESSYLKYLYINYNSNFQHFIHGQNKTNLQKVLSNMERLELSYLENLESFFHGDIKDISFNNLKVIKLLSCNKLGSLFLDSNMNGMLLHLERINITDCEKVKTVILMESGNPSDPVEFTNLKRLRLNGLPQLQSFYSKIEQLSPDQEAEKDERSRNFNDGLLFNEQVSLPNLEDLNIEETHNLKMIWCNVLIPNSFSKLTSVKIINCESLEKLFSSSMMSRLTCLQSLYIGSCKLLEEVFEGQESGVTNKDIDLLPNLRRLDLIGLPKLQFICGKNDCEFLNFKSIPNLTIGGCPKLEAKYLIQVLDNMKDLTIDLRRLEEILNKEKSVVELDLSLETSKDGGELFGKLEFLDLCGSLSPDYKTITHLPMEIVPILHNLKSLIVKRTFLEEIFPMTRLGNVEEWQNKRFKLSSLALRELPKLKHLCNEDLQKNSSMLQNLKYFSIKGCGKLNMFVPSSMSFRNLVDLKVMECHKLIYLINPSVARTMGQLRQLEIRRCKRMTSVIAKEENDEILFNKLIYLVVVDLPKLLNFHSGKCTIRFPVLRRISVQNCPEMKDFCTGIVSTPHLLTESIIHYDDATNKYIPILKDYSKEAIVKDMNVAIRQVWENHYDFNLHCLFEVENLEENRVDVKGIIFTH

SEQ ID NO: 227 - protein, 1361 aa, Cucurbita maxima
MEICSAAIVGPIGEKITNCTVDPVFRQLDYLVHFRSNVNNLSDQRKKLVETRDFVQHAVDSAKSNGDQIEGMVVEWLSITKKFCDEVDSFFNEANGRSLRWWNMLSRHRFSRRATKMATEVVKTIEEGRFERVAYRIPPQGIMMLNNSKKFEAFESRILILKEIIEALADANASVIVVHGMGGVGKTTLVEEIARLVIEGKLFDALAMTTVTQIPNVKRIQGEIADQLGLKFEEEKDRVRADRLRRRLEMEKKVLVILDDVWANLDLEDIGISSHHKGCKILVTSRKDDLYFGDFGTQKNIKIDVLAKKEARNFFNKMACDFVESSNDSDPEMEAVATELADECAGLPLALATVAQALKGKGRPIWNDALHELKFPSQPNNYGVNKEAYSSLKLSYKSLNRDEARSLFLLCSLFPQDYQINIKYLLMYAMGLGLLNGMNSLAAAKWRILSLVDELKTSYLLLDGVDSDFVKMHDIVRDTAILIASKMKSKYLVRHGAGESLWPPMDEFKDYTAISLGCSDHSELPEFICPQLRFLLLVGKRTSLRLPEKFFAGMQELRVLDLTSLCIQQLPSSIDQLVNLHTLCLDDCVLPDMSIVGELKKLEILSLRASDIIALPRVIGELTNLKVLNLSNCFKLKVIPANLLSKLTGLSELYMDNSFKHWNVGHMNEGNINARISELNYLPRLTTLHVHIPNPILLPNASVFGNLTGYRILIGDGWDWSGKFETSKTLKLKLERGNQREDAIQALLENTENLYLDELGSASARDILYSLDHKGFPKLKCLRVKNNSEIVSVVNSDSMQHLHSAFPLLESLFLKNLDELGSICRGRLPQMSFRNLKIVKVESCNRLKFVFPSFMGRGLIHLQKLEISECRAMETIVSKGIETQMQINGDKWVEKNKIEFPELRSLILQHLPELMSFYCYDSLAVPSTKRDSDQIISAIKTGFHPLLNQQVSFPKLETLKLHALNAGKIWQDQVPSSFSGVKNLTSLSVVDCASIKYLMTITVAQSLVNLERLEINNCKMMQAIIISEDKDLDNNHPSKSILQNQNVFPSLESLVVSRMDALETLWDKEATSGSFSKLKKVDIRHCKKLETVFPNFMLNRLTNLERLNVIDCSSVVEIFEVKVPVINGKQVAAIAANHLKELKLLRLPKLKHIWSTDPQRFLNYPSLQLVHTIHCRSLLNIFPLSIAKDLFQLEELKIQFCGVEEIVAKGGAEGDGDEYEDASFVLSGLTSLSLWNLFEFKRFYPGKYTLDCPSLTLLDVRHCKSFKLMEGTSESSTLSSALEKAEDDESTQRGKIERREADVLKEETFTRKEEITTTVQDNVEAELIEIRAQLQALVVGQNQMMEHLAQLTTIAREGISK

SEQ ID NO: 228 - protein, 1256 aa, Cucurbita pepo
MGEYVIKPIGRQLSYLLCYNRNKNKLKEQLQALKTARRDVQGRVQEARSNAYAIREEVSKWLADADNAIHDELSSNSSTPSAFNLIDRYQLGRKTKKKIEALHELIAKRINFVEVGYPAPLLETKNIIDIQRAGVEILVPIAESIMGEYVIKPIGRQLSYLLCYNRNKNKLKEQLQALKTARRDVQGRVQEARSNAYAIREEVSKWLADADNAIHDELSSNSSTPSAFNLIDRYQLGRKTKKKIEALHELIAKRINFVEVGYPAPLLETKNIIVPGGYLVLESKISMAKQIKKALQKAEVSRVGVYGMGGVGKTYLLNEVKKMVLEEKVFDRVIEVFVGQSNGVTQIQEQIGDVLNVKLPKSKEGRASFLRNNLAKMEEDVLIILDDLWKEYDLLKEIGIPCSSCKVLMTSRSQDILMNNMNATECFQVNSLSEEESWKFFTTIISDEFDTPDMENLAKMVARECGGLPLALDTIAKALKGKHMNHWKDALSKLRNPIGMDIKGVSDKVYASLRLSYDHLVGEEPKLVFLLCSVFPDHYKISLNDLQMYAMGMRLLRNINTWEDVKNRVLKLVHDLKSCSLLLEHSSDKYVKMHDIVRDVAIHIASMEGIMPTLSFGSKLSDWEDEYQSGAHRAIFVNCDNFQKLPQNLNFPDLELLILRSSNGFVGNLEIPDGFFAGMEKIKALDITGMSFLQTSWRSLKNIRTLCLLRCEFNHIDTIGELKNLEILRICSCKELDHLPVAMNQLTELKVLEVLNCSNLEVFPANIISSMNKLEVLKLRDSFDRWGEEVWYKDEVIKNVTLSELNRLPRLSSLRLEISKFRFMSQITSETSSKLKEFWVCVNKTDDFILPMVSHEYATTLILNIVLPKAIHGGLETLLKRSERLVVRDSVGRFINDVFNPNSNGYPFLKYLWIIDVHGHSNLPYLFRSEFNSLEFLTVYGMDRLMNLAPRNSPILPFKKLKSISIRSCGEIRNLFSISVLKALADLQDISVTDCGMMDGIVSIETEEQSTIFTGITSLTLEKVDKLKSFCTKLFIQEDPQRTIPCFDQRVSFPELKHLSITRGNNLEALWHSDGLASNSFSKLETVRIEGCKRLRFMFPSNTSARLDSLERIEVKKCGNLKRLLPSSVVFWSLSELSVEKCNGMMNLFSLTVAKGLVNLWSIEVRCCRGMRCVVAAEEEQGGVVFRGLRRVRLDWLPELVSFYGGKCRVKFPRLDRLFILGCPKMKTFSRGVVVTPILDRVWIDVRYFGVAVDVL

SEQ ID NO: 229 - protein, 1005 aa, Solanum lycopersicum
MVIEALSILKENVWDPYMGLEEKLETVKRKMEVLISRRKDIADEVKDAELHSSKRRKTEVKNWLSSVQKLENEFQCFEQELEQSSSFSRIGLSNQADKIHDEVEYLLDQGKFSEGILLHLNEEKMQQLVMKNLKGEAFVESLRKVLTSLNEVSSIGIYGMGGVGKTTLAMHIHDHLLKESRFWGNVYWITVSQDFSISRIQNNIANTIGLDLSSEDDDKKRTAKLFHSLKRKKSFVFILDDVWNIFDVTKMGIPLEIGGGKMIITSRSSEVCDKIGCQKKVKVETLSMTESWELFIKTLGCQWGDLSMEIEEITKKMTKKCDGLPLGIITMAASMRGVNDVFEWRDAFEEFTNSCMEMEDMNNDVFPILQCSYKRLRDPKLQKCFLYCCLYPEDYKIRRDELVRLLIVEELLVKRNSRKAELDQGYAVLNKLERACLLESVVNGNGSRCVRMHDLVREMALRIARDEINLMVRAGAQLREIPGEQEWTEDLDKVSLMNNDMTKISQPLSSICPKLTTLLLQGNSSLSQVIDPFFVQMPGLRVLDLSYTAIHQLPSSVSNLVSLSALLLRRCYGLRFVPSLKNLKNLIELDLFHTIIQEVPQGLESLVKLRCLDMTRDERVPKTLSKKPAVDILAKLSNLQFLSIPFVVRVEDLVGMRQLEVFHGKFVDVCSFNGFVKHQQQWGKPSSFVIALDTKSSSEPILESGHLSYDLTFYAERVILRHLLVTGDSVEMLRYDQIVDEARNVTLLPVNIQELLISECDFRTLGNSLLDAIPSLIQTKDLRLIKIGRCNGIEFLIRTSNCRSTRHQGLMSTCNTLETLERLVLHCLKEFSSLCKLELGEPLPPVGTFSHLRCLEVSFCDKMKKLIPKWLLQYLQNLTEIAVRICDEMEEIIADDEEEQVKQCASSASSSPIIVLPKLQMLYLHALPELKSIYKGRMTCGSIQRVTVSLCGKLKRLPFTLPLQNGQPSAPPELEYIRMSEKSWKTLDWDHPQYKNVLHPFVKKT

SEQ ID NO: 230 - protein, 899 aa, Daucus carota
MDIITPIIALISEFIGLVSKNINTAGDLDNRGTSLKTALEELTEAREDLESQVNQAESLGLTCTNQVKGWLKRAEKLEFEVRLMVQRVDQQEQDTVLCCCANCCSRYKLSKKVLKKINITKEFMEKSKALDMNWVDGNVIVPVMEIPSGPVIGMDVMLEKVYELLDKEEVGIIGVYGMGGVGKTTLLKCINNEFLTLNHGFNVVIWVTVSREFVAEKIQQAIMSRLGLSWDEAEDQEQLASKIYKVLKMKKFLLLLDDIWRGVDLEKIGVPIPKKENNCKVILTSRSMDVCSDMDAHCKLKVDFLREKESWHLFAEKVRRDDILNSQSIQPHAQAIVKKCRGLPLALITIGKAMANKETEEEWIAAKEMLNKSPSELRGMKDVFTLLKFSYEELANDTFKSLLLYCSLFPEDCSIEKELLVEYMVGEGLLLSSHEMGHALIGSLKVACFLEKGDQETQVKMHDLVRSFVLWIALDNGDDDMKFLVQPSAGLTEAPSVEKWERAHRISLMDNEITELSEVPVCQHLSTLLLQWNRSLSKISGGFFQYMPVLKVLDLSYTSIREIPKSISYLCELRYLDLSGTKLSTLPKEMGSLKNLRYLDLKRTHYLRTIPREAISGLSQLRVLNLYYSYVGWEIQDLTIENEIRFVDLEKLRHLAALGITVTEVEALEELFVFKNCIQFLYITSCERLYKLHLSLNPGDGKRLRRLSINDCSDLQYLAIGSKAENNWLPRLEAFALNNLPSLIKVWEKAVTPGALQNLRSITIWYCNKLKNVSWVINLPKLEMLYLFYCKGMEEVINVDDVEAGGVANTFLSLRTLSMRDLPCLTSISRWKMDFPSLQKIAVIECPRLKKLPLKSPEVSAPQTFTLYGEKAWWDELEWDEVGAQSAFLPHFIPTGQTN

SEQ ID NO: 231 - protein, 855 aa, Eruca vesicaria
MLVKVLNCLMRDDVQKIGIWGMGGVGKTTLVRELNNKLWKEADTQPFGMVIWATVSKEFELGRVQKQIAERLDMEVKLGESEETLARRIHERLEKVSSFLLILDDVWKAIDLDQLGIPQTYGRKATKIVLTSRFLEVCQSIKTDINFRVDCLCEEESWKLFCKNAGEVTRLDCVGPIAKEVSRECGGLPLAIITVGMAMRGKKMVEIWEHALEELKSSVPYVKSIEEKIYQPLKLSYDLLEPKMKSCLLFCALFPEDYSIEVADLVRYWTAEGFIDETQNHGYLMNQGITLVENLKDSCLLEEGAHGETVKMHDVVRDFAIWVMSSSRDGSHSLVMSGIGLCEFPHEKFVPSIRRVSLMNNKLKKIPSKVLECVELSALLLQGNFHLEELPVGFLISFPALRVLNLSGTCIRSLPNSLSKLHELRSLILRDCFYLEEVPSLEGLTKIQVLDLCATRIRETPRGLETLKSLRLLDLSRTHHLESIPAGIIPQLSSLEVLDMTLSHFHWGVQGQTQEGQATLEEIACLKRLSVLSIRVVCVPPLSPDYNSLIERLKKFQLFIGPTANSLPSRHDKRRVTISSLNVSEAFIGWLLTNTTSLVMNHCWGLNEMLENLVIDSTSSFNMLRSLTVEGFGGSIRPAGGCVAQLDLLPNLEELHLRRVNLGTIRELVGHLGLRFETLKHLEVSRCSRLKCLLSLGNFICFLPNLQEIHVSFCEMLQELFNYSPGEVPTSASVVPALRVIKLRNLPRLKSLCSQKESWGCLEHVEVISCNLLKNLPISSNNAHRVREVRGETHWWNNLTWDDKTTIETLQPRFVPADGNIPTASLGISCYQSFNTIEEASPIPSRSGSQAEELM

SEQ ID NO: 232 - protein, 992 aa, Glycine max
MATRIIESLVKISETYSLIFDLLYGFNSFNDNVQVLEMKLEELCSLEYDINKELEIAELQQGKKRKREVENWQRNVQRKKIEVYGIVQELRDCGVFKHLKLTAQVKKLIGQVTDLVERGRFPKGIVGCAHESRGYALLTTKLAGAMFQKNVAKIWDWLMNDGELIIGVYGMGGVGKTSMLMHIHNMLLTRVTNFDSVFWVTLSQSFSIHKLQCDVAKIVGLDISKESDERKRAARLSWTLMRRKRCVLFLDDVWSYFPLEKVGIPVREGLKLVLTSRSLEVCRRMNCQNNVKVEPLAKEEAWTLFLDNLGQQTTLSPEVTKVARSVAKECAGLPLAIITMARSMRGVEEICEWRHALEELRNTEIRLEEMEMEVLRVLRFSYDHLNDNMLQKCFLCCALYPEDFEIDRDVLIESFVDEGLVNGMKSLEAMFDEGQTILNKLENSCLLGKVENYVGGKKCMGLQDASSHIAISMMKRGCQCVAPIDNVEGYYVGSQLVKMHDLVRAMAINVIKVNYHFLVKAGLQLTEIPDEVEWNEDLEKVSLMCNWIHEIPTGISPRCPKLRTLILKHNESLTSISDSFFVHMSSLQVLDLSFTDIEVLPKSVADLNTLTALLLTSCKRLKHMPSLAKLQTLIRLDLSFTAITEIPQDLETLVNLKWLNLYAKNLVSTGKEIAKLIHLQFLILHWWSRKIKVKVEHISCLGKLETFAGNLYNMQHFNAYVKTMHEYGPRSYLLQLDSEESPGKSPWYFFAEVCFSKDVIISNCKIRTGVTPLMLPSDIQRLKVERCHDIRSLCDILSLKNATSLKRCEIADCDGQEYLFSLCCSSSCCTSLHNIESVELYYLKNLHTLCKENEAVAQTLPPPGAFTCLKYFCIYHCPIIKKLLTPGLLAYLQNLEEIIVHNCKSMEEIISVDGIDYESSGGNKYCVANRDAVKVTHPKLVSLSLKHLPELRSICRGLMICESLQNFRIFKCPKLIRLPETATPVQTLYDCF

SEQ ID NO: 233 - protein, 950 aa, Helianthus annuus
MDVVVVDGAKTVFEFICSRIKALSKYEENINELREEIANLTEKKMAIEEDITLARLEGKSPQPQVNEWLLKVSRAEDDVRQLLEMADANAVGKGSKMMQCWTVAKKLNLVKELNSTHCEKRSPIKSVVEMAVPPLVGQGAASDMKQLLEILNRDDIRRIAVWGKGGIGKTALVKNLSNELYFSYPNLFDTVIWVQVSRSLDLSMIQSQIAKRVHLKVEAGDTTHSLASRILQGLKLRRKTLLILDDVWEKIDLDAVGVPSRDPCCKILLTTRSRDVCRHMEVDVFFQLKLMSEEDAWNLFVHSAGPVFDLNGIESPTKKIVAAFSGLPLAIKTLANSLRDRPHMELWQNMYLRYRCSSPLFKNIMKEIFGTLATSYHSLPSKILKQCFLFCSLYPASCSIDVGELIQCWVSDGLIIENLTVEETFNYGLALIECLKDSCLLDQDSEGTVKMHGIFRDLAIILSQSQELSYGFHTQSGLPFYQMPNESSRRVSFIRCRIKKLPEFPVYSQLTVLFLQGNPIQKIPNDFFHNLISLRVLNLSETRITSLPPSFLCLRELRSLFLRNCSIEKLPSLTSLGKLLVLDLSSTRIKALPNGFGSLRSLRELNLSCTPFLNKIVAGSISGLSRLETLDMSFSSYNWNPKTTSDQKAKFDELLSLEHLSILRIRLNSVKCLESASFLLKKLTRFNIQISPWSHDSNNHIAKHNEKRLVLRGVDLLQEDLRDLLHNTSSLDVLTCVGMTRRHLLSLSSLISLTISNCDDITRLISKERSSKEMLPNLQHLVLDHLQNLETIVDEIIPRGQCLRNLTTIQVLDCPKLKGAVSYALLRHVKKLEEIKVSSCESLSWIIESGEHEEPLPNLRVLEISNMVNLRSIYVGTSVCPALQRIEVSCCPELKELPFSISDLSSLKEIRGEIKWWNNLRWEDDDVKNMFLQYFQAYPQENCSRKRKYK

SEQ ID NO: 234 - protein, 959 aa, Lactuca sativa
MDIVSSSLTAVSLLLSPLEKLLFYSRNFKERERTLLCEMEELISKENDLKAEISIALVNQRKKLRSETQLWLKNVENLIAEVKNIETEIIQNKRCIKECFPNYRSRYRLSKKMMKRINDMRELHAKGVFSNGLFVDSFPNPGRILPTSGLVGDKTFQSVSKVIWEVLGDVNTSKLGVHGMGGVGKTSVMMHIYNQLIDCKVFDKVIWVNVSKTLNVEKLQLDIANAINLELSEEENVIWRSTRLLEHLQGKKFVLILDDMWHHFSLEEVGIPHPTTDNGCKFVIITRLMEVCRGMETQREIKVELLSKNEAWDLFTTKSGPICEEIESIAKSVCENCGRLPLAIITVGRAMRKIEDKRLWKNALEELESSRAEISGMEEDVFARLKFSYLHLKDDHIQACFLYCALYPEDHKIKASELIEYWMAEELITEVGDREKEINKGYTVLKKLKDACLLEDIGSDHVKMHDLVRDMAIRIARESPRLITKAQMKLNRMKREWIENVEWVSLMDNNITIFPDNPNCQKLSTLLLQRNPLPEKIQDSFFMKMQCLKALDLSGTGIKSLPESVSSLCNLRALFLSFSKIKELPSLTMLKELRVLDLSHSRLRKLPHDIENLNNLRRLDLSYTEKLQTFPSGAIQKLSCLENFSMFKSNWRWSANRDGFESFDEISRLSRLTSLGLSFEDKTSFIGYVKSKQWLVLESYHLGIGQLNILLPTVEGMRSIEIQDCNLCHQDKMIELPNNIQQLALHSCHDITILSELSDTTNLENLRQCYISNCNGMEFITKADNFFPNLELLVLRKLPKLKAICNGITSSQIFTKVKSLQIHSCNRMKSLFSSHMLQDFQNLEEIEVWNSRLIEEMVEEEQSGGNISSFSTVLLPKLRRLSLSMLPELKYITRRVLICDSLETVEIWDCEVLRALPFSISYLPSSLKNIKGNINWWDQLEWDDTSCKNLLQPFFDQGT

SEQ ID NO: 235 - protein, 888 aa, Nicotiana tabacum
MVFHRDKKRWSLLTSLLNNTYHRRQNKSFKGKFGDFVTKMEANEAGESFFTTKLFGQETKRTCERIWRCLKKDKVTSIGIYGVKGVGKTTLAKLINHLLQQKTQYQVFWINISQESSIRELQSDIAAAIGLDLLEEEDEEKRATALHDSFKGKKDFVLILDDVLEDIPLKMLGNPLKVEGGRLIVTSCLLETCRKMGCQRKFGVKKLEEEESWSFFIEKLGNEKVVIHQEVEGMAKSVVNSCGGLPLRIITIAKSLKGLELDGVNQWKKALENIIQESLKGENNDVIEMLLYSFNCLKEQNLQQCFLYCCLYPEDEKIPKDKLISRFILEGLIDTKETREAEFEEGYEILSRLESVCLLENAIDNKGNQCVKMHNLIREMALRITNENPKFMVKAGVQLNDAPKEDEWLESLDKASLMRNEIAEIPAGTSAKCPRLTTLMLQQNYHLLKIPDSFFEHMKALRVLDLGYTCIEKLPDSVSDLENLTALLLAFCWNLRSMPTLEKLEALQELDLSGTGIQTLPVALETLLNLKCLNLHAMRWLEKIPIGILPQISSLQCLVLSHHIDVEGEELEELKELEEFQGRFSNVQDFNQFINAQENEGCLRFYRILVGQYDGLGPMTQIQFNHNRFSDKLVKCYGLGKEDEVLLLPQDIEHLKIESCNNFSGCLSEHLPRLYDSKDLKYFKVRWCNKLEYLMRIEVSEESVIFHSLEHLDLLELHSFVGIFDDWKTSLRASISVSIFSCLRMIRIERCHSIKKLFPIGLCSNMQNLERIYVLSCSQIEEIIADENDGIVVLPTLTRIYLWSLPELKSICNGKMDCNSIKKVSIKECGKLRKLPFFFSSQEEDEKFTIPSTLKEIAIHSSDKEWWESLEWDNPNTRNELQPFVKYW

SEQ ID NO: 236 - protein, 901 aa, Ocimum basilicum
MFRQILESFVSKAGEQIVEYAHNVLKSKIDLETLQSNLDSLISKATDVEERIKKGEVSGQKKRKREVEDWLRQVKSIEAQVIELETRAESAGFVRKFLAGGKATRMNEEVGKLVEQSRQFGELLTDVCGTRGDTLLTARMFGGAFCKNLENILSLLQTRRVSSIGIHGMGGVGKTTLAKNINNRLLEKSEGGVFWVTVSQEFSVKNLQDKIARYLNIELLDEDDEGVRAARLHGVLSKQKNFVLILDDVWECIDMAKLGYNLSGECCRLIITTRLLKVCHQMCCQDIVAVQKLKEDEAWNLFAETLTWRKGANLDPQVEEVAKSVVKLCDGLPLGIITLGGSMRGETNIHTWRNALAELREYVRGQDSMGEDVFEVLKYSFDRLKTNHQHRGNGFNLFQLCFLYCSLYPEDQEIHRGQVIRRFISDGLMDKRESRRAQVDLGHYILDKLVNASLLESCVDYFGYECVKMHDLVRGMALRIRRGKYMVRAGEKSLKEIPKEWRKHVEKVSLMNNGITTIPNGISPICPKLSTLLLQGNPLEVIPDSFFSNMHFLRTLDLCNTHITILPNSISVLTSLKALLLEGCGMLQYVPYLGNLKALKELNLSGTSIQKVPQGVEELLNLKFLSIDAPLLEMLPRRLLLELGQLQYVKFPFHLQVVMEEVENLRELEEFWGTVKDVCDFNRFIRSRQSRVHDTLYNIQVGGTYVEDFRYDYKQLVLFKYDLKDRKDHHLKFRVLNILVLVELEGLKGVVEKWDIGASALGVFSSLRLLHIENCSKMRKLGLPVSGFPKLEVITIELCGELETIFEDEGRGCVTLPELKELNLRCLSRLKSVCKATLVCESIKEIGIEKCPRLMKKLPLFLAWDTPSTLKSIRVEKQWWDSVEWDNPNHQHLLQPFLKLF

SEQ ID NO: 237 - protein, 992 aa, Phaseolus vulgaris
MATRIIEGLVKTREIYTLILDMLCGFNGFNDNVQMLEMKLEELCSLEHDINKELEIEELEHGKKRKREVENWLRNVHRKKNEVYGKVQDLRYGGVFRNFKLIVQVKKLTGQVTDLVGRGRFPEGIVGSAQESRGYALLTTELAGAMFQKNVRKIWDWLMNDGVLMIGVYGMGGVGKTSVLIHIHNMLLTAVTNFESVFWVTISQSFSIHKLQCDVAKIVGIDISKESDERKRAARLSWALMRRKRCVLFLDDVWNHFPLERVGIPVRADGLKLVLTSRSLDVCRRMNCQNSVKVEPLSMEEAWTLFVDNLGQQTTFSPEVEQVARSVAKQCAGLPLAIITMARSMRGVEEICEWRHTLEELRNTKVKPKEMEMEVLGVLRFSYDHLNDKMVQQCFLCCALYPEDFEIDRDVLIESFVDEGLVNGMKSLEATFNEGHTILNKLENICLLGKVENYVGGKKCTGLQDASSHIAISMMKMGCQHVEPIDSVEGYYVGSQLVKMHDLVRAMAINVIKVNNHFLVKAGLQLTKIPDEVEWTEDLEKVSLMCNWIHEIPTDISPRCPKLRTLILKHNESLTRISDSFFVHMSALEVLDLSFTDIEVLPKSVSELSTLTALLLTSCKRLKHMPSLAKLQSLLRLDLSFTAITEMPQGLQTLVNLKWLNLYAKDLVSSGKQIAKLTRLQFLILHWWSRKIKVKVEYISCLRKLETFAANLYNMHHFNAYVKIMHIYGPRSYLLQLDTEESLGNSPWCCFAEVCLRKDVIISNCKIRTGETPLILPLDIQRLKVERCHDIQSLCDVMSLKNATSFRRCEIADCDGQEYMFSLSCSSSCCTSLHSLESLELYSLKNLLSLCKEDEVVAQIFPPGRAFTCLKYFFIYRCPIIKKLLTPRLLAYLPNMEEITVHNCKSMEEIISVDGTDYESYGGKKSYVTNRDTIIVTHSKLMSLSLKHLPELRSISSGQMLCESLQNIRIFKCPKLARLPETATPVQILYDS

SEQ ID NO: 238 - protein, 941 aa, Solanum tuberosum
MQEKLTVDKRCLNRCLPNYMSRFKQGKHINKKIKEVDRLLGQSLFPDALLVDMMPRRGKILPASSLVGESAQRSLETVWEYLNDEHSGIIGIYGMGGVGKTSILVEINNRILRESTIFDNVIWVTASNDSNVQKLQKDIARAIGLSFDDEDDEMTRAAQLLEALMRRSRFVLIIDDLWEAFPLEVIGIPYPYYGYDCKLIITTRSMIVCRGMESVREVEVSVLSEEEAWNLFKQKVGEEVLASPTLQAVAKDVSKECGGLPLAVVTVGRALRRENDLRQWKNALSQLKSATGRIEGMENRVFARLRFSYERLKDNVTRSCFLYCTLYPEDHHIETEELIKYWTWEGLLDNLGYGESKMLQGKMILDELKHACLLEIIGCQEGSLNEYVKMHDLIRDMAIAVTRESPLFMIRAGHEMRVPPVESEWLIGLERISLMRNDLNSLNLEPRCPQLTTLLLQYNSLTKGVHPSFFNHLKSLKVLDLSYTGISGLPDSLSNLENLHALLLRSCWNLHHVPTMERLKELRVLDLSSTSIECAPPGMEMLLNLKHLDLSHTTLHEFDIQILGTYRFLESLLTIGLWQPLMLGPDFVDVVKRCTILTTLEANFSNLQDFNYYASSDHWNTLESFKFCVGYPQSSKLPGKNSVGFFGTHIVETEASSWLPGILELVIHECSGITHLPMFIVNASSDLKRCKIKYCDEMEWIITPEWGTFPNLELLEIEGLSRLQNICKGIPPTGTLSNLKVLNVIACDNLMTLLPLELVQHLKNLEELELEHCSMLEEIIVTEAENEEIIQENNGEVVLPSLQKLRLVSIPRLRSICRGPMICDSLTTIEVVDCPELEILPFFLETRQQLADFLKQIKGSRSWWWRLKRKHPTATSLLAPLLRPEREYSFAADEHSYILSSGNSSLGHDNILTVEVEVGLILKILYPICLCCIVAASRIRT

SEQ ID NO: 239 - protein, 1016 aa, Vitis vinifera
MEYVEAVLTSIGLLKDMWPSISKCFNYHKILDKNCRTLKEKMERLKSREQDVKIELQNAQYQRKKEKKEVENWLKEVQNMKDDLERMEQEVGKGRIFSRLGFLRQSEEHIEKVDELLERGRFPEGILIDVLRDEGRALLTTQLIGETTTKRNLEKIWTCLEKGEIQSIGVWGMGGIGKTTIVTHIHNLLLEKKDTFGLVYWVTVSKDSSVRKLQDVIAEKINLDLSKEEDERLRSALLFEALQKEKKFVLIFDDVWEVYPPREVGIPIGVDRGKLIITTRSREVCLKMGCKEIIKVEPLYEEEAWELFNKTLERYNALSQKEEKIAKDIVRECAGLPLAIVTTARSMSVAYDIAEWRNALNELREHVKGHTINMENDVFKILEFSYNRLNDEKLQECLLYCALFPEDYKIRRVLLIRYWIAEGLIEEMGSRQAERDRGHAILNKLENVCLLEKCENGKCVKMHDVIRDMAINITRKNSRFMVKTRRNLEDLPNEIEWSNNVERVSLMDSHLSTLMFVPNCPKLSTLFLQKPKFSYPPKGLHEGLPNSFFVHMLSLRVLDLSCTNIALLPDSIYDMVNLRALILCECRELKQVGSLAKLKELRELDLSWNEMETIPNGIEELVLLKHFSWISYHSRQTILPNPLSKLLPNLLQLQCLRHDGEKFLDVGVEELSGLRKLEVLDVNFSSLHNFNSYMKTQHYRRLTHYRVRLSGREYSRLLGSQRNRHGFCKEVEVWECKLTEGGKDNDDYQLVLPTNVQFLQIYTCNDPTSLLDVSPSLKIATDLKACLISKCEGIKYLWWVEDCIDSLNSLFLDLLPNLRVLFKLKPTDNVRCSSLKHLYVSKCHNLKHLLTLELVKNHLQNLQNIYVRSCSQMEDIIVGVEEEDINEKNNPILCFPNFRCLELVDLPKLKGIWKGTMTCDSLQHLLVLKCRNLKRLPFAVSVHINDGNGQRRASTPPLKQIGGDKEWWDGVEWDTHPHAKSVFQPLFVQGKGFRWLKNNWVTSRWRETVDNIFEEV

SEQ ID NO: 240 - protein, 908 aa, Zea mays
MEFVASIVDTVFRPLKDYFARTVGYVMSCGDYIDAMGNEMNELKSKRDDVKRMVDAAERQGMEATSQVKWWLECVALLEDAAARIVDEYQARLQLPPDQPPGYKATYHLSKKADEAREEAAGLKDKADFHKVADELVQVRFEEMPSAPVLGRDALLHELHACVRDGDVGIVGIYGMAGVGKTALLNKFNNDFLINSHDVNVAIYIEVGKDFDLNDIQRIIGDRLGVSWENRTLKERAGVLYRVLSKMNFVLLLDDVWEPLNFRMLGIPVPKHNSQSKIVLTTRIEDVCDRMDVRRKLKMECLPWEPSWELFREKVGDHLMSASPEIRHQAQALAMKCGGLPLAIITVGRAMASKRTAKEWKHAITVLKIAPWQLLGMEFDVLEPLKKSYDNLPSDKLRLCLLYCSLFPEEFSISKDWIIGYCIGEGFIDDLYTEMDEIYNKGHDLLGDLKIASLLEKGEDEDHIKMHPMVRAMALWIASDFGTKETKWLVRAGVGLKEAPGAEKWNDAERISFMRNNILELYERPNCPLLKTLMLQGNPGLDKICDGFFQYMPSLRVLDLSHTSISELPSGISSLVELQYLDLYNTNIRSLPRELGSLSTLRFLLLSHMPLETIPGGVICSLTMLQVLYMDLSYGDWKVGASGNGVDFQELESLRRLKALDITIQSVEALERLSRSYRLAGSTRNLLIKTCSSLTKIELPSSNLWKNMTNLKRVWIVSCGNLAEVIIDSSKEAVNSNALPRSILQARAELVDEEQPILPTLHDIILQGLYKVKIVYKGGCVQNLASLFIWYCHGLEELITVSEEQDMAASGGGGQGSAAFRVITPFPNLKELYLHGLAKFRRLSSSTCTLHFPALESLKVIECPNLKKLKLSAGGLNVIQCNREWWDGLEWDDEEVKASYEPLFRPLH

SEQ ID NO: 241 - DNA, 201 bp, Spinacia oleracea
  source 1..201: mol_type = genomic DNA
tttcatggtggtgtggtacaggttgaaaagtttgttcaagatgccatctcaaaggtaactaattcgtttttggtacacactagcctacttcccctcctctyttggttctttatgcataagctctgaaatcctttaacatgaataggagagcattgcaatgttgatgaattctgaagttcatcccccgcccccttggtactc

SEQ ID NO: 242 - DNA, 201 bp, Spinacia oleracea
  source 1..201: mol_type = genomic DNA
agaaccaattagttaaacattggaaccaattagttaagcaatgtaactaattagtcaaacaatgggaccaaatagttaagcgatgaaaccaattagttaarcaatcaaatcggtcttttctgtaatgcggtcttacacaaaagttgtcgtttgaagttagagtcgatttcttttcaccactgtttttgggaggcaaatcac

SEQ ID NO: 243 - DNA, 201 bp, Spinacia oleracea
  source 1..201: mol_type = genomic DNA
ttttaagtgtttatatatagtggtggatattagttgtgcttagggtgggcccgacccctctaggcgaaaaattatgtacggagtaaagtacttttttttarttatgatccccttaaactttgtgtataattgtaaattacacggagtaatatattacttcattttctactgtcgttctcataaagctataaggtcccacga

SEQ ID NO: 244 - DNA, 201 bp, Spinacia oleracea
  source 1..201: mol_type = genomic DNA
attcacgaaatcttggagataacgaaagaattcctcgccgaattatgattgcaggttactatgatataccaaagtgatgagttgagagccacaaatattgraactatgaagatatattgaatgcaacactaatatctgataacttatatcattagctatttgctttagctgatagtcattgattgttgggagtttcttgac

SEQ ID NO: 245 - DNA, 201 bp, Spinacia oleracea
  source 1..201: mol_type = genomic DNA
gtttacggattagtgagataaaagagtttcaagagttgatttctgggctgattttgcattttggaggatatttttacaattttgrgtgtttggtgtttttrtggagtaggtgagctggagaataatgcgttttggagttacattatgatgatgatgatggcttacacaaattttggggtagaaaagcgatgatggttagca

SEQ ID NO: 246 - DNA, 201 bp, Spinacia oleracea
  source 1..201: mol_type = genomic DNA
taatttttacaagggtagtgatgtactttcaccattaaaatgagggtgcttttagcggaataggacgtcggataaaatcatactcgtgatattagggcttraaatacatagtagttgaattaagctagtgytctaaccgcctctccctcccttcttacgaaatactgcctctgttccacaatacattcatcatttcttttt

SEQ ID NO: 247 - DNA, 201 bp, Spinacia oleracea
  source 1..201: mol_type = genomic DNA
gccatttatagaaacggtgcaagtaatccgggacggctttataaggaaagcggtgcaagtattccggaacggagggaataatattcaagaaatataaattytgatttagataaacctctactacatatttcgtagtagggtaagagaagtttgtcaactttaacatttgacaayatgataagcaaaagaagactacgaacg

SEQ ID NO: 248 - DNA, 201 bp, Spinacia oleracea
  source 1..201: mol_type = genomic DNA
aagaccattcaacataaccccatcaaatttaactctaggaaaacaccttataatctcatcccacatacccaatttacaaaatcctcgaaaaaccaaattcyaaacagcaacattcctctctggcatttcattcaaaactttcaacccatcatcaacaaaccccatttgcacataaagatcaacgatagaactcccaatgta

SEQ ID NO: 249 - DNA, 201 bp, Spinacia oleracea
  source 1..201: mol_type = genomic DNA
tgtaaggtctcagcattggtgcatattagagagctatcatctacaggttggttttgaggtgagatctgagcaaccatacaacagaagagtatcactctccrgatgttctttgactggtcaagagggagactacgttgtgcttccaagtaacatccaggagttgtatgttgataattgcagagactttcgttgcctatctga

SEQ ID NO: 250 - DNA, 201 bp, Spinacia oleracea
  source 1..201: mol_type = genomic DNA
cggatggagtagtaaatacaaaaaaaattgatacaaaagtggtgtatttttaaggtaataaataccaaaaaatcctacaaaatatccaattaacaaatacragtacgtagtacaagtagatcatacaaacatactatgattttcccgtatctatatcgtatcgaaacttgtgtttgtgttcatcatcgtccaataaagggc

SEQ ID NO: 251 - DNA, 201 bp, Spinacia oleracea
  source 1..201: mol_type = genomic DNA
tgtaatgtaataatgcaaatataatgtactcgagtaagtgatagtcacaggttcgattcctctatcctccacttgtaatttgcacggactacagaatatartccatgtggctcattcgcaccaagaaaatgcctacacagaaatattaagataaatagaaaaacttacaaaaaagagttgcagaacaaggacactgatctg

SEQ ID NO: 252 - DNA, 8543 bp, Pisum sativum
  source 1..8543: mol_type = genomic DNA
gaatcacaactaggcttttctgcaattgatgcgttaaactttgcaaatgcacaattaaacatttaacaagttaaacatttaattcttcatagatggcctgtatcacaatcaactatcttcctataattggtctccttccaaatacaaaaccagtagttctcttaaaaatgtaaaccaaattacaaattgacatcataggacatcgatggacattctgattacaaaaagaaaggggtctaaaatatataaatcaacacacaattgaccaacgggaatagtaacagtttcggccaacactcaattcatgaattcagttgacagtaactttcaagacatcaagtctgttgtggttggccaaatatattctaattaattcgcttaagactccctccactgtccaccagcttcagtcattgttcattgaatgatacagttatttggtgaaattttgaacaccaatcgaaggtacaaatctcaaataagccttagttcatactctccacccgttgttatgtatctcacccatggaagagcctgatacccacttttctcaataatcttcaaatatctaacctgtaaatcgaaacataaatgtttgattagcatcttgattaaattaatcaaaggctggtttaactgacaaaggatatcatagattcaatatatttttggtcaagagtggctgataagtatccaagcaattgaaagactctccctcaaatgctagctacaatggcaaacgaagcaagccacttaaatactcaaagtgagactggcactggacaccccacaattccgaagttcctgttatagcaccaccccagagagccgacattcaggtcgctttaagacattttttatggccttttcggtcaacctttttgttggtagctgtttcagtttcttaactgttattaaattattaggagagttagtgggtaattattataattattatcagagtgtttaggtttagaataaataggggaagagattgggggagtggatcaccgtggatttgataggaaaaggaccattttggcattgggaggtgcagaccctcgaagttctgtggtactactttgtaattcaaaaggatttccctattttctattctatatcagttggtttctatcagtagcgctttccaaggggccaacatctggctctgataccattttataaatactaagtaagcacttgaaaccacccatgaaggctaactattacggggagaaccgagacacttaaatattcaaccgagcatccaatactactcaatgtggggcttgggcaccccatagtatccaagtccctatcatgatttcaatgttatatcatgtgaatgtgaataatgatgcttcatttagtaatattataaaattcatatctagtacacacaaaaactgttattagtagaaaggtataaaatgatgtatattagtttctaatccaacaaaactgatttaatgatttaccatctatcaacactctgaaccgaatataaactcaactgtgaaaacaaatttgaactataaaatactttcatccccatggaaataatgaaaatgacaggtgagacaccatcagacaaataaagcaggaaggcgtgaaagatacataatactagaaatggaattaacaaatatttagaaaataaaaagaaatttgggtacgtttagcaatacctgtattcctgacacagtaaaataaggtatctcaaactttacacgtataggagcttttctctctggagttgcttcctcgtctgttatgctgggaagacgaaactctgcccttaacatgtactcctgatggtgttgaacaagaaaaccaaattcgttatttcacaataaaatgagtatatcaatcatgggtgttattcatggaaaaaaaaaaacatttccaagtcaaccaataccttgcctccaggaaaagatcttattttccaaattaatgcatctttctcaggtgcatatgctgcagatcccattgatgtccgcacatttggagtggttgcatcagcaggcacaggtaattcaatctcaacatttgtagcagtgctgtaaaaataaattattttaatagatggagaagtaaatacatgtagggtggtcaaaaataaaatctagatcaaacaactgaattaattcataaattaaaggtaagtagtggttacatcttccatgaaagaaaactaaggaaagaagaacatatatatccattaaaaaaacatatcagtacctacgttccttaaactgactcctagcttttaccgtaatctcaatccgactttttgaatgcttttcaacttgtgcttccacccaaaataaaggcttaacctggaaatagagatcatatgatcagcaaacactttgaaaatacatttgtatgtcaacgcacgactcaaacagaaaatcatttcacatctagaggataggaacctgtgtgctgagcctatatgtcatcaaatcaaatgatccatcgggtgggataaaggatattgttcgatcattctcaaatcgggctaatcgcacacaccttcatcaagcatcaacacagtttgagaactagaatcaagaataacataaacatgcttgaagagagcatattaaatatgcaacataactttttatttagttaatataagaagaaaatcaagtatacgtactgatgaaacttgatgtcctccaagtcaatcgcttttcccttagtcgctctaccttgtgcctctaataacactctatcatttaagccaagtttacactctggcataccactgtattacacaacaaggcatggatgaaatatttaagtttccaaataaatacacaatcacagaagttgcttagaataaaatatatttcaaaacacaacaaaagcaatgtgttccaaaccaatattaacggcaaaacaagggtgtaatatgagtcaagtagtaggacatatctccaaatatctaatgatgcaatgtttaatcccacctacttaagagaaacatacttcaattgctactttcattagatagaaggaaaataatgtatgtaaacccctactggtgtattacaggaggaaacataagaataaggcctaagtgttagttagtagcctccgttagttagttcctaagtgttagttagtctctaagtgtgtgttagttttattcggtttcttatttgcttagcaatctgtaacgtttgttctttaactgttttttctgttaggatagagctctaagatcctttaccttatccctatgtaaaggaagtctataaataaggttttccttccccgttgagaggatctttggcatattatagtctttgagtggttttaaaccggtgtaggagagtatcttctctcgtgtaatatcctttttctaccaataaaactatagggtatagggtcgaataacctccttttctctgttgttcttctcatagatagccttgaggccaaggttgattctgtggtgtggtatgtgtgggtggggggggggggggggagtgataggtccaacacgtgtgataacccaatttgggcccaaatcatacaaacaaagcttctagaaggttgtagaaactgtggaaataatagttagttggaatattccctgaattttagggaattttctgttataaaagagggaaaggtccaacacgtgtgataaccacccaattatacaagcacagcatctaggagtttgtagacgcattggaaataatagttagttgggatattccctgaattttagggaattttctgttataaaagagagggaaaggtagtgtgtaaggcatttagaaaagtagttaccaatctgttaggagaatattctttggtctgggaactgcctgctatagttaggacttaggagtttaacaactctggtttactcttttcaatttccatttcctaccattgtagagctcatgagctcatcttttccaatcaatgatatacggttttgttatcttgattgtacgggttctatcattctctcttttttcttattacaactcttgactggtgtgtgtttttcaactgctagagggtctttttttgtcttctatgccattatttttccttctatagccattttttcatgacaaatatatatatttttaatattatttctataataatgttttttttgacagaatttgtataatcatgttatattatcaagcttaaatcttgagttggggaaccaatatatatttttattttgatgttttgttgtgtttgaacaatttagttgtttcatgttatattataattataaaaaaaaatatcttacttttatattttatattgacacaccagtgtcttggctttttaaaaaatgttctatctcatactactcatacccaatacaagtaccatactcatacctatgcatcccagccaaaacctaatgccatgccaccctgcatttcattagaagaaaattgagatacagatctagagcactaaaattccaaggattgcatatttcccaattgcccaaaggccctaaatctatccaagatgcctcccttcctttaagcccttcctcgtatatctttacacatcacagcctagcttaatttttttaccattcttaccaaacatatccaacaccgcatgtcatgcaaacctgcattttattaggaaaccatagggaaaattcccttgaatacatacagaactagaacacttaagttgaggctgcaaacatcacaatttcccaaaagccctaactctatccattgacaagatgcttccttcaaatcccttcaccgtgtttctatgcacatcacagccaaaccttaatcttttaccatacttgtatttttacaaatcatatccaagaccctgtgttatgggaacctgtaatttaatagaaaaaaattgcctaacattccccttatcttcaagctgaatagcatagacaagtaaataataatcccaccagaatcttactatcgtaagtccctagcaccagtagtttcaattataaaatatttcatagacctttatgctgtcagttccacacaaaagtcccatccctcatgtcaagaagactggcttctataccaaccaaatatttcagagtcttgtgcagccaactccatgcaaaagtctcatccaaaaaatggaagagttgaagaaaatgtaaatcatagaagaccaatagaggtgaaaacggtttaaatatgtgaaaagaagatcaatagatgctcgggtcagaaaagttggatagaaaacgggtagcctaataaaatattaagtgaaaccattaaaaaggaccaagaattaaatagctagagtgccacactatagaattggttttggataaaatgcaaaggtgccacttaatttatataatgtaacccacccacctagttgaaaaaggctttggtcgccattattgttgttttttcctgtgtgccctaatgctaatgtgttgcacaactcacaccctttattttccatggcttgattagacaataactccaatgtaaagaattgaattgcttatcaagtaagataggtttattcttcagggattatttaaagacatggaatggatatggatatggatttacagacacagaacaagaattgttcaattagatagaggtagatatactttatctaaattgcataaatagaacttggggtcatgggaatcaaattaggggcgggtaaaatcctgataagctgtttttagaagctattcctaggaaataaactgaaaacagcttatagggatgttataagatattttcataagtacctttcaaacacttacacagctacttatgtcatgaaaagtaagaataaataaactacaaataagctcttccaaagaccctactgaaaatgatgaaacctaaactgcctgtgagttattttaacaacaccttcatgtcaaattgaataacgggaaatagcttatcattggatcttgggaacactttctcaaggattttatgcagttgtgtttaagtgacgaaaattacttaactttgtacaatgtagtaagttcaaaaaaagataatgagtctttgaggattttgagtaccttgctaaaacacatccatgaaatatggctgtggcagcattattttcaccatattggagaaaactcatcattagtttgaaattagtgtagaaacccgtgtcatacacaggataaatacttgatttttaaaaatcactaaattatttggaaataattacaattaacctatatagagggaagtcgaataatgttatttaacattgaatagtacctaaaaatattagttttcttaataactaaatataagttataagttattataatatatgtagtatgaattttaaaaagtgaaacaatagaattcagttcggcaaatcaatctcagcaacagtggttaatacagccagataggggagacgaagacatgtaaacaggtggttggtaatttggctgtgtaaaatatattttgatcattctatgcatggaaatagctactactgaatgtaaagtttaaagaacacaaatcatgacttcactatattgctcataattcatcaatttattttatattaaaactacaggcaaaggtgaaaaggaatgtataaaataaaatgttaacaagaaggtagtagactagcaggtgactatggaacagccaaaagcaaaagcaggcagtttaggatctatatgaatctatgaagcatgggccccactggtcttaggcacgtcctgtgtctgacatgtttcaaacatcgacacatatcacatgtgtcagacaattcacttaggtgtacaatagaaaatatagttttttttacttcaaatagctgtcggaacacactttggctcggacaggacacctaaatgatttctgactaatctccccaacaaaaaacctatgtaagccatattactaaacccaaataactagtagcacatctctaagaggttgaaattcagtagttctcagggaaagcataaagcaaacctcaaatatgttctcatcttcagtgcaccaacaacatcagatctaattatttgcccattgctattgacaagtatgttaacactctccaccacatccaagaaaacctgaaaacaaaatatattaattggttgcttagaccataaaaccacacatccaaatgaaacatcttcacttttataacagtgacctcatttttcttgtagtttatcccttcactgcgccacgatacagcatttgttacagccatgggaggtctctgtgtaacttccattctataagcatctgtcttaataaattcactaagaattttcgcctcagtatattgggggtaaccaaagtccattatttcatcaagtagttcatactgccaaccaaagaaataattcagcattttacccaaatgaattaatgcaacaaataaaaaactaagttcatagatacacaagcactttaccacaacgacaaagttatccctaagagattcctcttccaattcctcaaaataatgcttgaacacctgcctcaaacacattccaatcaataattattattgcacaatgcataactaaactatcgaaagttacacaaattttcaatccaaattattcaaaaccactagtgcttacatcaactatgcgatgaaggaagaaaataaggcttgcggcattgcagttttgtcttgttgctgtcatgaggtaaacattgctatgctgtacaaacatatagctcacaccattatcatatacaactggatcttgagactgtggatcaccctgtcacaatttcaaaacaagcttcaccatccatactcacacaaaacagcaatcaaaattatccattccaattccaccattattagcacaaaatgaataattatagtgaaataagaaaacaaaattaaacaaggagggataataaaggcgtgaaatgaacctctttctcgatgagcttggtgaagaagcgttcggcttcaacggcggtgacatcaccacggtaatcgcgccaaatgagaacgcggcctttgatgtcgagaaggaagagagcagaggctgcacctgacattggagagtgattccgagcctggatcggatcggatcggagatggatcagaatttgatcagtgttgggaagaagtggggaaaaagttagggttcaggcaatgtttgaagatgaatcatgttgataattcagtttctggtttcgcagttttcagattggagttttttcttctttttttttttttttttttttttttgcttataattcttcttctacggtgggttgaaacttgaaagtgagtgcaatctcagataaaacgatgccgttttcaatactcggaaatgaacatagaacaggaaaagcaataaagaaaccaaacaacttgttgtgttattaaattacaagtaaattatcaagttagttcttcaaattgtaatagtggataattttattgtctttttttttttgttgttgttgttgattgtctaaaatttaacaaatttataaatagatacaaatttggtacaattaaaggctaatatttta

SEQ ID NO: 253 - DNA, 4809 bp, Pisum sativum
  source 1..4809: mol_type = genomic DNA
gaattttatttttatttataatttaaaaaataacaattttaaagggttttcaaaggattgagttgcaattccttatacaaataaaaagaaagttgatttttttaaaggagaaagttgaaattcacaataataattttttttgacggattgataaataaacaattttttaaaatctgaaaatgcttcaataacttgttttctggtggtgctaacggcgtcgctagagtccctattctccgtcgtcttcttctttcatcaccaccgcgacgctgattcaaattggatccgatccagcgtttgaacgcatcatcaatgtcaggggcagcttctgctctgttcctcctcgacatcaaaggccgcatcctcgtctggcgtgactaccgcggcgacgtctccgccattgaagctgagcgcttcttcaccaaattcatcgacaagcaggtttcacttcacttcattctctcagatccaaattcaaattcacactccacacgatgtctttatgaacgaatcgattttttttgttaggctgatgaacagtgtcaagatccggttgtttacgataacggtgttacgtatatgttcatacaacatagcaatgtttaccttgcgattgcggcgagacaaaactgtaatgccgctagtcttattttcttcctgcatcgactagttgatgtaagcacttttctgattcgatccttcattgaattagtttttctaagtaacgtgcaatcagtaatatcggtgtctgtggcaggtgtttaagcattattttgaggaattagaagaagaatcgctaagggataactttgttgttgtggtaaaaatgttgctcgaagtgattttatatgaatgagtttgttgagtttcgcggtttggttttgatatttggatttgttgtgttgttggcagtatgagctacttgatgaaattatggactttggttaccctcaatataccgaggcaaagattcttagtgagtttattaagactgatgcttatagaatggaagttactcagagacctcctatggctgtgactaatgcagtgtcctggcgaagtgaagggattagttacaagaaaaacgaggtggttattagagaagtgaataattgtatgtttttgaattgtaatatgatggtcttggctcggccactgagttgtacttttttatttttgtattcaggttttcttggatgtggtggagagtgttaatatactcgtcaatagcaacggacaattaattagatctgacgttgttggggcactgaagatgagaacatttttgaggtttgcttcttgctttgcttgagatctattgtatttctaggtattgttttgtgatcttttaggttttggtattgattgcaacatctaaattctaatactccctctgaatgatgtataagcaaattacactacttctctctcctatttaatgacatgatctctaaaatactctcatttaatttaacttcttataatttcattgaatcaatttgtttgtagagtaattaagaccgtagacttaatttttaattaagactgcctagatttaatgtgataattgttcaactacttttcttaatgtgtaatttgatctaattttgctaatatttctctttggatgaagtattgttggcagttttctactttgtgttttttacttttcgatgtttctattcttgtgtctattcatatgtggacactatagggtatgtatgtatacatggttattggtgaggactgaagtgatagacattagggattagggaaccaagcctatactgattccttatattgaatagttttgtatactatatttttcttgggtatcatctctagtggaaatttgaggaatgcaaatgaaattagcaatttggacttcatgttttttttctttctgtttgtactgatttcccatggatgttgctttattcattttgtacatttgaagctttcttttggagctcatactgaacaatggacatatatgtcaattttctacccattagatattttgctgacaggtccaaccactggatacatgtagtacattcacagttgagagcattaatagtgaagtatctattaaccagcagccatactggagtatctatctggaaactgacatgttgtgtttttggcttattataatgcagtggtatgcctgagtgtaaacttggtttaaacgatagagtgttgttagaggcacaaggtagaacaaccaagggaaaggcgatagacttggaagacatcaagtttcatcagtatgtatggttgactttattgtctttacaaattgttctctcagaattaaatatttcatatatatattttcaagcatttttcctcttcttgatgctagttttcaaattatgtctggcattttatgaaggtgtgttcggttggctcgatttgaaaatgatcgaacaatttctttcatacctcctgatgggtcatttgatttgatgacatacagactcagtacacaggttcatcttccgttgatataaaataattttttattgagaggtggtgcacacacacaacacactcagagagcgagatcattttgaagtctctgttgatcgtaccatctcttttcaggttaagcctttactttgggtggaagcaactgttgaaaagcattcaaagagtcggattgagattatggtaaaggctaggagtcagtttaaggaacgtaggtactgagacttcttttctgatacctgtcatttttctttatgttttccttgacagaagatgagggatcttttccctttaattcatgctgtgtggtttttgccccagattttagtcttccctaaatatccttgtttcaccaactaataggatttattttatagcactgccacaaatgttgagattgagttgcccgtgcctgttgatgcaaccaatcctaacattcgaacgtcaatgggatctgcatcatatgcacctgaaaaagatgcgttgatctggaaaattagatccttccctggaggcaaggtaacatggaagtgtctttgaatcctttgaataatgtccatctagatacctaaatttaatttgatgtgatttattggattcaaatcttctctttttcatattttcaggagtatatgttaagagcggaatttcgccttcccagtataacagatgaggaagcaactcctgagagaaaagctcctatacgtgtgaaatttgagataccatattttactgtttctggaatacaggtatgctacataaacatgattttcttatgagtattgttatttgttaggctattatttcagtatttgatacaatgtttgcttccttcaatgaccatgtctgatcaaaatttaggggaatatttccttcattgtaataatatatcattccttcatgttgtctatctcaccattttcatattggtgtatctgatagggacttggggtattattcggtgcccaagtctcacatcaaatagtatgggatgcttggtggagtaaataggtgccttgtttcttctcccttaatagctccctattaagggagggtttcccaagtgttagaaacttatcaactggtatcagagtctggctgtcgacggctcagaaagggctatgcggaggaagggctgattggaaagcccgagtaaattgtattagagtgccagccgccatgacatcggctcatagacgaggttctatggtaggctcttggctattatggggtgcccaagtcctgcatctagtaatatgggatgctcggtggagtatttaagttgcttggttctcccccttcatagccaccttttatgtaggttccctgagtgcttagatatactgttagaacttgtctctgccaacattttgattatttcaatggattgagggtgtagtgaactaaacaaatctgttttagttcaatttgttttcacaattccattgttatgcagaagttttcaagaaatgtttatcaatctctttagcaaagaattgaatcaattgatggtaaaaaaaagaacttgacatcagagaaggttcagaaattaataagcaattacgggtatcaataaaacaacagcaacaacatcaaatttgatgaaattattaagttttaccacatatttgatagtattgttcatttagtagaagctttgattgatttgatggagaaggtaatcaaaatgtaatgtttttgtcttttaggttagatatttgaagattattgagaagagtgggtatcaggctcttccatgggtgcgatacataacaatggcaggagagtatgaactaaggcttatttaaggtcctctatctgtttttggtgattgtgtcacatccgcaatgatcagcgactttaaacatttggatgaggtctggggctcttcagagaagttaaaatttatttggccaaatgtctatctcttcaagataatcattttggcaacagattgtaagttgctcactgtctataaagttcacaccaaaaatcaggaattcgcaaacgagcctgtacctcgtgtgcaagtcctttcgctcaaatacgtttatgtgcagaaaatgtatgtttttaaacctcattttgctttcattcactatctgatttcatcttttccattgtctttatattttaatatgatttgattttcatttgaaagagaatctttagcttttgtattactgtcttttcgacctttagtaatttacactgtacaatatcaagtgtttctagaagtacagtgagtaagatgatgttgccttcaaatgtagtgtagtaaatttcatttaatatatatttagacattcgtgctgc

SEQ ID NO: 254 - DNA, 5738 bp, Glycine max
  source 1..5738: mol_type = genomic DNA
aagaaaagagacaaaattgaattaaattaaacaatcagaagattcagcgggaacaaaattagtaatttagtctttactgttttattgtttattgctgggacggcgtcgtatggtcacgcctcgcactcgcgctctggagtttcaacccaccgcaccgcgccccgaatcgaatccaacatacgtttccaacgatagacagaagaaacaaaatccgaagctccaattcctcctaactgcagtagtaaccgaaacccgatgaccctagccatggtttagcttcaaacatggctccctgaaccctagcatttctccctcttcgcaacaacgccgatccgatcccgatccctttctgattccgatccgatccgatccaatggcgggggcagcctctgctctgttcctcctcgacatcaaaggccgcgtcctcatttggcgcgactaccgcggcgacgtcactgctgtcgaagccgaacgcttcttcaccaaactcattgaaaaagaggttcattccttcttttctccaatagatgattatgactattcatttatctatgctcgtgcagctccaattatcttcattttgtttccggtgctgttttgaacaatttgtttctgatgtttatttgttcttttttatgcattattgatgtttgtgttaatagtggtgcaattgggattgagaatatggattgttgcatagtgaggttttgttttgaaattgtcgcagggggatccgcagtctcaagatccggttgtgtatgataatggtgtgacctacttgtttatacagcatagcaatgttttcctcatgatggctaccagacaaaactgcaatgctgctagcctccttttcttcctacatcgtatcgttgacgtaagtgttatttgtagttatggttttaaattgaaaatttggtttgatttggagtgataatgattgatgggaatggtttgtgtctgaggtaggtgtttaagcattattttgaagaattggaagaggagtctcttagggataacttcgttgttgtggtaaagtactagtgtgcctttgaacacagtttctttatgatttgaattgattctgctaggtaaaatgctgattacacatgtcctttgcagtatgaattacttgatgaaataatggactttggctacccgcaatacaccgaggcaaagatacttagtgagtttatcaagacggatgcctataggatggaagttactcagagacctcccatggctgtgacaaatgctgtatcctggcgcagtgaagggataaactacaagaaaaatgaggtgggcattagaatatcatcttgacttgtagtttcatggtctaggctacccattaatattgttcttttctttttccttttccaggttttcttggatgtggtggagagtgttaacatacttgtcaatagcaatggacaaataattagatctgatgttgttggggcattgaagatgagaacatatctgaggtttgctttatactttctctgagaactagagtttcaagccattgacatgagctattagttaattgggttagtgatatggtttacatttttttaatcttgaggggattttggggggttgggtagatcatattttatgaagagtgaaaattgaagaagaatacaacataggagaatcaggaattccttcaacaggtaaaaaatgaaaaaaaaaagaagctaaaaagagcactctgatttctctgaatatctcacaaaggaactcccttaaaaaaccacacatatgaaccaaatgtgagcagggaagactattggtttgagggaaaattcaatgctgtagaagtttacagtggcaaactttccagtagcttttatggcaatctttacaagcaagttgtcaccactggcaaactctccactctccagtgacttttatggcaatttcttttagcaagttgtcactgccagtgaacttttttgctaaacttccagaaaaattctctgacaatatttcaggcaagcttcaactcttggttacgtttccagcaacttccggcaaactttcgactacttttttggcacccttcaagtgccgttgaacttcttcagagaagttattctccattacccctattatgtgatctctttcataaattctcagtcattccaatctccaactgcctccccattactagttgtgtcaactccagctttgtggacgtgtgcctggtgtattttatcttatttctacatttgttattgaattctctgattctgtttggctccgctagctgcatttttccattatactaagatctaatatgttatctctttgcaagatttgatgtgttttcagttcttggtgaatttggagaagttttctagttctgatactttcgaccaactattcataataataatcatttttgccatttggttgtgttgtctttcagcaatgcccatttctccaatgtctccagcatccctatgttgccttttcaattgcctttactctgtagtggatcccattttgtatttatctatattttgtaaagggtttatttgcaacaaccttaaagcttactaagctttagcttaagggggatcaatataatcacaggtggttcacgtgtctctcacaacttgttaattgcatttagggttcataagaactagtatctaggaagtagcagtccatttattcttagcccaggaaacaatactcacttagtccgtatatataaatgttatgcatgatgtactgcatacagaaagcagctttactcaagttattccatcctatcaccctctctatttgtccctttctttccctctaaactctacaagcactataccttgctggcatattttcttattttgtgctgtaagcctgtagcaaggttccccccatcaaaagtacaataaataatgagcaaacatcctatggtactcccagctcaatttgcatctgtgtagacttctatttgcaaatctccatgcttcatacagcctctttgttcctggtgaccctttttggtcaatcaaaattctataaacagctacaaagtgttccagtcctggtgattagggtaattaggccgaatatcttgttgatcttgttaagttctttccctaattataggaaaactcttgtacagagtttctatatatatgaaagggttgactctctttcctaagcaagtcttcaatcaaatatttgctccttgtctctgtttcaagtatgagtttctacagctttacaccttaacaacccgttctccattttagtggggctattgccagtatgaggatgtgatgaatctggatgttcttccttcctattggttctgattctcttctctcgtaatttcctactattcctccccctatttgatgggcatgttaactctgcctgttcatttcatctctttgaatgattaatcaagttgtattttcctttccagtaattctaatgctattatattcagttctgagatttcaagtaatcttacagctagtttatataaattgatttcaagtaatcttacagatagtggtttggatttaggtagactgtacattcattttgaaatatctattaatgttattgaattctgtgctagagtattattcaatccatggtttgtacaatgcagtggtatgcctgagtgtaaacttgggttaaatgatagagtattattagaggcacaaggtagaacgaccaagggaaaatcaattgacttggaggacatcaaatttcatcagtatgtatgcttgattctcttccttgtattcactgattcataattgcgtgtgcaaattaaaatatatactttctacaagcttgtttatgtctattcttgactaattctcaaattatgtgccgcacttgacaaaggtgtgtgcgtttggcccgatttgagaatgatcggacgatttcatttatccctcctgatggatcatttgatttaatgacatataggctcagtacacaggtacatcttctcttgatatgaaatatatttctgtttgagtggcaacataagaattacataattacactcattctaaaaaaataacaattctatgtctgttgattctttgatctttggttgcaggttaagcctttagtttgggtggaagcacaagttgaaaaacattcaaaaagccggattgagattatggtaaaagctaggagccaatttaaggaacgcaggtgctgttattttttcttttcccttttatatctgttcctttttcctttgatttttccttcatgaaagagagagaactgcttaccttaaatttatgtactgactcaatgagtggtctgctttagattttagaccactctatatgtatttacttctccaactactcagagaatttaattttacagtactgccacaaatgttgagattgagttgcctgttcctgctgatgcaaccaatccaaatgttcggacttcaatgggatctgcatcatatgcacctgaaaaagatgcattaatctggaaaataagatcatttcctggaggcaaggtattaattaactaggaaagtgcattgtacctatgaataacatccataattgatgccacaatttgattgtgagttaatggatttggttctcttatttgatacttcaggagtacatgttaagggcagagtttcgtcttcccagtatagtagatgaggaagcaactcctgagagaaaagctcctatacgtgtaaaatttgagataccatattttactgtgtctgggatacaggtattgctccgtgtactgatgtacaatcttcttatattctgaatattgttatgcctgtatgcatctctatcttattaaaagatgaatatttcctgtattttatatctcacacttttccccattggtgtctcacttgtcattttgattatttctctaggcatgaagttgccattagtgaactagatgaatattttgaaattcatttttttcacggttgaattgatattgagttcacaaaaaatgtttatagataaatattaaattgtaaagtaaataataattactaattactaatgggaagaacttgacatcataaatggatgagaaactaatataaatactaccaggtaatctgaatgaaacataaatatccacatgatatactgttgaattattgtttaaatgaggttttgactcaaggtgctaatcaaccatgtacatgttttgatttgtaggtaagatatttgaagattattgagaaaagtgggtatcaggctcttccatgggtgagatacataacaatggctggagagtatgaactgaggctaatttgagatttgtgtccttgtttggtattcacaaaataaatgtgtcattccgtgatcgtggatggaagagggagtctcgagtcattaattttttaccaaccccatatgagttactaattgtctagaaagttgttgcagctgaaaattctgagttggaaagtgtgagccgaaactcttgcaagtcccttcggtcaaatctgttttgattgggaaaatgattcgttctccctcttcatttttaggccttttttgtaatcacaatgtgtcgatctttttccaacgtcttcaaattgtaatctgatatacattttaaagagaatcatagggttttgtattagcaagtaaatgatttctacagacaaattatagatagggaataattgtccctcagccatgtatgaacgacaaatttttaaatatttattcacagttttacag

SEQ ID NO: 255 - DNA, 10447 bp, Glycine max
  source 1..10447: mol_type = genomic DNA
aagtgcagtaaccgaaacccaatgacccacctagccatggtttggcttcaaacatggctccctgaaccctagcgtttctccctcttcgccaacaacgctgatccgatcccgatctgtttctgattccgatccgatccaatccaatggctggggcagcctctgctctgttcctccttgacatcaaaggccgcgtcctcatctggcgcgactaccgcggtgacgtcaccgccgtcgaagctgaacgcttcttcaccaaactcatcgaaaaagaggttcattccttctttctaccattatatgattattcatttatctatgcttctgcagctccaattgtgtgcactttgtttccggtgctgttttgaacaatttgtttctgctgttttttttatgcattattgatgtttatgttaacagtggtgcaattaggattgagaatatggattgttgtatagtgaagtttgttttgaaattgttgcagggggatccgcagtctcaagatccggttgtgtatgataatggtgtgacctacttgtttatacagcatagcaatgttttcctcatgatggctaccagacaaaactgcaatgctgctagcctccttttcttcctacaccgtatcgttgacgtaagcgttattggtagttatggtttcaaattgaaaaacttttggcgcaataacgattgcttggaatggttttcgtgtctttgaggcaggtgtttaagcattattttgaagaattggaagaggagtctcttagggataactttgttgttgtggtaaaatactagtgtgcctttgaacacaatttctttatgagttgaattgattgtactaggtaaaatgctgattagatatgtccttggcagtatgaattacttgatgaaataatggactttggctacccgcaatacactgaggcaaagattcttagtgagtttatcaagacggatgcctatagaatggaagttacacagagacctcccatggctgtgacaaatgctgtatcctggcgcagtgaagggataaactacaagaaaaatgaggtgggcattagaatatcatcttgacttatagtttcatggtctaagctaccaattaatattcttctcttctttttcccttttcaggttttcttggatgtggtggagagtgttaacatacttgtcaatagcaatggacaaataattaggtctgatgttgttggggcattgaagatgagaacatatctgaggtttgcttttatactttctctgagaacatatctgggggacatattttatgaagagtgaaaattgaagaagaatgcagcataggaggatcaggaattccttcaaccagtcaaaaatggaaaaaaataaatgaattaaaaagagcactctgaatatctcacaaaggaactcccttaaaaaaccacacatatgaaccaacatgtaagcagggaagactattggtttaaaagaagattcaatggtgctgaagtttccagtggcaagctttctggtagcttttatggcaatctcttcaagcaagttgtcaccactggcaaactctccagtgacttttatggcaatttcttttagcaagttgtcactgccagtgaactttttgccaaacttccagaatttttttctgacaatatttcacgcaagcttcaactctgttacttttccagcaacttctggcaaacttttgactatcttttttgacatccttcaagttccgttgaacttcttcagagaagttattccccattacctcttatgtgatctctttcataatttctcagtttgtgtcaatctccaactgcctccccattttatgtgttgtgtcaactccagatgtgtggacatgtgtctggtgtatttgatcttatttctacatttgttatcgaattctctgattctgtttggttcctgtcggctgcatttttccatttatactaagatctgatatgttatctctttgcaagatttgatgtgtttttagttctttgtaagttagttatccagctgtccttgacagctggcacataactaactagaagcttgctgtgaaagtcttagaatcttcctctagaagtttgtgtaacttgctctgcaagtctcacagctctatataaactacagtgtaactgaaaacagttgggaataatatcagaattcataaatctcacaaattctctctctctctctctctctctctctcgctttctttctctttttgattatccttttctaatttggtatccagagccaaaaagatccttcgatggcagaatctcctcctcctccttctgctactcctttctcttcatcgtcagcgttctcgcacttgatttctgagaagctcactgatttgaacttcttgctgtgaaagcaacaagtagaaccagtgatcaaagcgcatcaactacaccgttacttggtgtgtacgattcctcttcggtatgcaaatgaagctgatcagaactttggcactgtgaatccggtgtacactgcgtgggaaatacaagaccagatgctcctgacatggctacaatcaattctctccagctcgattctatcgtgtattctaggatctgttcactcctttcaagtctgggaaaagattcatgatcactttcagaagctaactcaagcaagagctcattaacttcatgtcctacaactaatagtacttggttcccagattcaggagcctcgtatcatgtaacagctgatcagaacaatatttgccaacttggctcttttgaaggtccagactaaatttacattggtaatggacaaggtttgcacatttcatcctctggttcatcttcctttcaatcacctattaagtcaaatgtctctttgtctctacacaatttacttcatgttccttgtatcaccaaaaatctgatcagtgtcagtcgttttgccaaggataattcagttttctttgagtttcattctgacttctgtcttgtgaaatctcaggcaactaaagaggttcttctttgaggcacagtgggtcctgatggcttatactagtttccaagcctccacttgcagcctcagtccaagctgttttttccagcacattgtttagtctctaattctagtttacaaacaccagttgtaactaattctagttcacaaacttcatgtgtaaccactgctgtttctcctagctctaaatttgtggcatgtttgcttaggacatccaaatgatcacaccctcaaacttgtattgaacaattgtaatatacctgcatcaaataaagaggctactttcttttgttctgcttgtgctattggcaaatctcacggattgcatgctccctcgtctaacgccacgtataataagcctttggaacttgtttacagcgatttgtggggaccttcccctatgatttcctttggtggcgttcactattacttgtactttgttgatgcccactcaaggtttacttggatatatcccttaacgtctaaagctgacactttcaccttcaaacagtttaaaaccgtggttgagctgcaatataatcaccctcttaaagccttgcaaactgattttggggggggggggggggagttcagacctatcaacaaatttctcacagatttaggggttattcaccaacttgcttgtcctcacactcatcaccaaaatggtgtagtggagaggatcgcattgtggagttaggtcttgcacttcttagtcatgcgtctatgcctctaaagttttgggatcatgcctttatcacagctgttcatcttataaatagactacccactgcctctttgcggttttctgttccttacattcttaactggtcaaaatcccacatatcagcaccttaaagcttttgggtgtgcctcttttccttttctcaggccctatcattctcacaaactggattttaggtcttattagtgtctttttctaggatactctacaaaccataaaggctataagtgcctgtctcctactggcaaaatattcatctccaaggatgtggtgttcaatgaaaccaggtttccatatactgatctgttttctaaatccatatcctcctctaccccaacatccttgtcctcctttttagcaaacattccccttgttggtcctccacttgtcactcccttaccaaacactgtacccaactccccttcccctcctcctcaaacttcccaaactcatgttcttgattctggttctgacattcagtcagttcccacttctcctattcctcaaaattcccaaactcctgttcttgattctggttctgacactcagtcagttcccacttactcttctcctattgattcctcttccactgccactgtgtctagtccaacttcctctgagtcagcctcccaatatcccattcctcagaattctcaccccatgcaaacaagagccaagtctggaattgtgcaaacttgtctacatccgtctttatttctctcacacactgagcccaagtctgccaaacatgcccttcaagatccaaactggcagagtgctatgcaagctgagtttgatgctttagttagtaacaagacatgtaccctggttcctcttcctggtcgtcaagccataggctgtaaatggatatttcggatcaaggagaatcctgatggctccattaacaggtacaaagccaggttggtggctataggctttcatcaagtacaggggtatgacttcaatgaaaccttttctccagtggtcaaacctactaccattcgtctgattctcaccttggcactcagtcatcactggaaactacattagctggatgtttacaatgccttcctcattgggctccttcaagaaaccatctacatgcaacagcctcctggcttttactcccaagataaatctcttgtttgcaaactggacaaggcactttatgggctcaaacaggcccccaggtaatgtttgaaaggcttcaaagcaccttactgcaatatggttttcacaccagtaaatgtgacccctctctatttatctacaaaaaggacagaaatttggtgtatcttttggtgtatgttgatgatatcatcataactggccgctccaattatctcatccagtctctggttcatcacctaaattccaacttttctctaaagcaacttggtcaactagattactttcttggcattgaagttcaccatacacctactggttctgtgttactcactcaaagcaaatacatttgtgatctactgcacaaaactgacatggctgaggcaaaacccatttcttctcctatggtgactaacttgaggctctctaaaaatggtgatgatcttctctcagatcccactatgtacaggtcagtggtgggggcccttcaatatcccactatcaccagacctgaaattagctttgctgcaaacaaagtctgtcagttcatgtccaagcccttggaatctcactggactgtggtaaagcaaatcctcagatatctgaaaggtactctgcactttggattcagatttggaccagcctctcttcctcagcttctcagtctgcaggcttactgcgatgctgactgggcagctgaccctgatgaccgaagatccacctcaggtgcagccatcttcttaggtccaaatctgatctcctggtggtcacgaaaacaacaagtggtagcttgctctagcaccaaggcagagtacaaaagtttagctcagacttaagctgacattctgtggcttcaaaccttacttcaagaacttggcatgccctcttccaaacctctctctctgtgataatcaaagagctgttgcactagcacataatcctgttcttcatgcccggaccaaacatatggagattgatctcttttttgtcagagagaaggttctcagcaacaagcttgctgtagttcacatacctgctcaggatcagtgggcggatcttctcacaaagcccccctcatccaccagatttcagtttatcagggacaaactcaaggtgtttgagctctctgaagctcacccaccttaagtttgggggggggggggggggggttatgtgagtattgtactattgtactcggttcagaatatgtaagttagttatccagctgtccttgacagctggcacataaccaactagaagctttctgtgcaagccttagaatcttcctatagaagtttgtcacttgctctgccagtctcacagctctatataaactacaaagtaactgaaaacagttgggaataatatcagaattcataaatctcacaaattctctctttctttctcttttcgattatccttttctaattttccctatttataggaaacctcttgcatagagtttctatatatatgaaagggtcaagagactctctttcctaagcaaattttcagtccattatttgttccttcattcttgtctccgtttcaagtaggagtttctactgctttacaccttaacccattatccatttgtctagaacatatttttctggtttatgaatatagctcctttaaatctagcaaattatttcctcaaaatgttccagtggatccaaatccttagtttcaaatagacctcctagcttcttcttaagggctgtaagttcagcttcataataatccattaatatatgaacattcacatagactattggtgctgcaattttcccattggctgagagtttaaagaaattggactggccacatgcatatgcattcagggaggagattttagtggtgctattgccagtatgagggtgtgatgaatctggatgttctttcttcctattggttctgattctcttctctcgtagtttcctactattcctttccctatttgatgggcacggtaattgtgctagttcatttcagcaatacaaatgattaattcaagttgtaatttccattccagtaattctattgttattatattcggttgctctgagatttcaatacgactcattccatttctgaaaaacagttcagtttcaagtaatcttacagctagattatataaattgattgctcctatgtgacatgttggtttatgggctagtaccagctgctcttggctttctggttactattttgggtctatttatatctacttgtgtgtgtgtgtgtgtgtccaatatttctgaaactgttgttgtattttgtccagctaaaatttgagaaatgctaatgaaaataggattttgaagtattttgttttctgttactgattagacatgctcagattgatttgttcatattcactactgttaaaaattttaggagctggtgctaaacgatacatgattagagaatagttatattgcagataagttcaactacttggctcattttagattctacttttacagttgatagtggtttggatttaggaactctgtacgttcattttgaaatatatattaatctaatcaaattctgtgcttgagtgttgcagtggtatgcctgagtgtaaacttggattaaatgatagagtattattagaggcacaaggtagaacaaccaagggaaaatcaattgacttggaagacatcaaatttcatcagtatgtatgcttgattctcttccttgtattcactgattgataattatttgtgcaaatttaaatatatactttctacaaatttaaatttatgcttgattcttgactaattctcaaattatgtgctggaacttgacaaaggtgtgtgcgtttggcccgatttgagaatgatcgaacgatttcatttatccctcctgatggatcatttgatttaatgacatataggctcagtacacaggtacatcttctctgtatatgaaatatatttgtttgagtggtgacataataattacataattacactcatactaaaaaataactattccatgtctgtcgattctttgatctttgtttccaggttaagcctttagtttgggtggaagcacaagttgaaaaacattcaaaaagccggatcgagattatggtaaaagctaggagtcaatttaaggaacgcaggtgctgatatttttccttttcccctttaaatctgttcctgggagagaactgcttaccttaaatttatgtactgactagtggtctgctttaaattttagaccactctatatgtatttacttctccaaactactcaagagaatttattttacagtactgccacaaatgttgagattgagttgcctgttcctgctgatgcaaccaatccaaatgttcggacttcaatgggatctgcatcatatgcacctgaaaaagatgcattaatctggaaaataagatcatttcctggaggaaaggtattaattcactaggaaagtgcattgtacaccgatattgatgctatagtttgattgattgatggatttggttgtcttatttgatacttcaggagtacatgttaagggcagagtttcatcttcccagtatagtagatgaggaagcaactcctgagagaaaagctcctatacgtgtaaaatttgagataccatattttactgtgtctgggatacaggtattgctacatatacaatatttttcttatattctgaatattgttatgcctctatgcatcgctatctgattaaaagatgaatatttccagtattatatatctcctatcctgaagcaaagactctaatactgtaccagatacaacaaggacatggataattcaacacggctaatataaaaaatataggatactagaacacctctctatatataggagagacaaaaaaaactaaaatgaaatgaatatgaacataacatatgatcttattaataatcaatattttcatatcatcaagttcatctttttcctatgctagtgagcatcaccaataaatattaagaagaattgttttacaataaagtacttggtttctttacaaaaaattccaacaaatgaatatatatttttttataacactagagtgcatgttcattcatatttcataggggtatggcacaagtgttcaagctgacaatagacttttttttaattgaacacttaatgaggaatgtctgacctgtataagacaggtgtcagtgtcagaagcatgttcaacactgtaacacttcaaacaagagaggtgtctttacttgcttgttgccttggtgtctcacttgtcagttttattatttattgaggcatgaagtaattagtgaactcgatgaatcttttgaaattcatttgttttcatgggcgaattgatattcagttcacaaagagtgtttatagatattaaattgtaaaataattactaattactaatgagaagaaagaacttgacatcataaatggatgagaaactaatatacataattttataacttttctatggttaatagttttgtgtagtagtaatatgaattgcgtgactaggtaatctgaatgaaacatcaacatccacatgatataatgttgaaattattgttaagtttaccatatactgtgatgttttagttcagttaaatgaggtttttattaattaatcaaggtgctaatcaaccatgtaaatgtttttgatttgtaggtaagatatttgaagattattgagaaaagtggttatcaggctcttccatgggtgagatacataacaatggctggagagtatgaactgaggctcatttgagatttgtgtctttgtttggtattcacaaaataattgtctcatttaacgatcgtggatggaagagggagtctttaatcgatttttggctgaccgcatcaaattataagttactcattgtctagaaagttgtcagctaaatctaagctagaaactcttgcaagtccctttggtcaaatctgttttgataggaaaaatgattggttcttcctcttcattctcaggccttttttgtaatcacaatctgtccatctttttctatcgtcttcaaattgtagtctgatcttcattttacagagaattctagggttttgtataattggtcaaattgtagtctgaccaattatagatagggaaataattgtccctcaaccatgtatgcacgataaaatatacatgtatttttcaaatatctattcacagttttacagatatattgcagaaaagcgcggttgtgttctgtcttttgggtgtataagattgcagtgtaacatgagagttgagatggtaattctatagtgtttgtggggttccatacctggatacatgagctgcatatagggagaaataaggtcagttgaattgttaacggagaagggaagaggggaaagattgtgattttgatctcctaacaaaagtaccatgtttgggagaaagtggagttctgtttctctcactgaagaaaagattttcaattggagtttgaacttgtttcgttgaagccaacccgatgtttgattttttttctttcagattaagaacacaatttatcaaaagattatgtattacacttaaatgattatatatttctggttaat

SEQ ID NO: 256 - DNA, 4811 bp, Glycine max
  source 1..4811: mol_type = genomic DNA
gtataccagtctttcttcttcttcttctttctgtgttgacggtggcgttgatctgattagaatctgggatccgatcacagccatggcaggggcagcctctgctctgttcctcctcgacatcaaaggccgcgtcctcatctggcgcgactaccgcggcgatgtctccgccctcgacgccgaacgcttcttcaccaaactcatcgaaaaacaggttccttcaccttttcctctctctctctctctctctctctctctcgtaaacctaatttctcattctcattctctaagctctttttttttttttgttgaaggccgatccgcaagctcaagatccggttgtgcacgacaacggcgtgacctacatgttcatccaacacagcaacgtgtacctcatgatagccaccagacagaactgcaatgccgccagcctcctcttcttcctgcaccgaatcgtcgatgtacgataaagattctcctttaaacctttccaaatcgagaatttcgctattagttcgtataagtaataatcgatccgtgtgtttctcgcaggtgttcaagcactactttgaagaattggaagaggaatcgctcagggacaacttcgtcgtcgtggtaaaatgtcgccgattttagatcgttctttctatattttttgataattgtgtgaatgtattcgttgaattgaattgtgttgttttgggatttgttgtgtcgttggcagtatgagctacttgatgagattatggactttggctaccctcagtacactgaggcgcagattcttagtgagtttattaagaccgatgcttatagaatggaagttacgcagagacctcctatggctgtgactaatgctgtgtcgtggcgcagcgaagggataaactataagaaaaatgaggtagacattacaaaagtgaagagtctctagctttttgaattgtaatttgatggtctaagtggtcgaattgtacttttgtactttttcggtcgtgttttcaggttttcttggatgtggtggagagtgttaatatacttgtcaatagcaatggacaaataattagatctgacgtcgttggggcgttgaagatgagaacgtatttgaggtttgccttatactttccgtgagatctattgaatttctagctagtggtttgagatgggctgctaactgacttggctttctactattgattgatctgtctaaattctaatctgttggtttaggggatagcatgtggtgatctcagttttctgattttctgttttggatgcttttgttgtcgtgttcactcatgtgtgctggttattggtgaggactgaagaggtgcattagggattagagaaccaagcctaaactgagtttttatattgaatatttttaaaactatttttgaattatgtataggtaaattttgaaaaatgtaaatgaaattagcaatctggacttgggagttcattcttttctgtttttactttatgctgatgacacatgcttgtcaatagctttattcagtgttttaaatagcacgctatagtggcatagcagtgtggagcggcccctgctcactacagggtctggcgtagcggatcaaatagccggctgaatagtggcactatgtcttgattccaaaaatgccctttgagcaaagacattagggctttttcgggggggctatttttggggatttcaatttccaaaaacaaaatctacagttgtaatagtaatgaaaaatgataaggacttggataatattttgaagatgataattgatgattcctatctaggaaacttgtatttgagttcagttgttatttacatgaatgttttgtttaagacacctatgactttttattgttaattatgaattggatgtcattaattctgagtaatttttatcatttttggagattatatgtatttagtatactatacattatataaactatattaaaaaattaaaataacggctatcccagtgtagcgtttttggggctggccactacacattgctatctagggttttttacattgcctttattcatttgttactcctgagcccagaggctttcttttacaactcttgctaaacataatacatatccactgcccacttgttaggtatattgcagattggtccaaccaccgaatccatattttactccctactttattgggtatgtttgggatagctgcaaaaattagattatttcaataatcgattattgttataatctattataatcagatcagttttttgtttgggtaagtttgcagaaaagttgtttaaaaataatacagttgagagttatttggaagactgtgttaaccatgaagtatctattattctaactgatatgctagagtatttatctaaaaatcaaatgtgttgttcttggcttttctaatgcagtggtatgcctgagtgcaaacttggcttaaatgatagagtattgttagaggcacaaggtagaacaaccaagggaaaggctattgacttggaagacataaaatttcatcagtatgtatgcttgaccttgttgtatttacaaactgatcatttagagcgaaaattttatagaatttctttaagaatgtttcctcttcttgatgctagttctcaaattatatctggcattttatgaaggtgcgtgcgtttggctcgatttgaaaacgatcgaacaatttcctttataccacctgatgggtcatttgatttgatgacatataggctcagtacacaggttcatctttttctctagatatgacataagtttctgttttgagcggtaaagacagagaaagagagaataaaagcattttaaagtctctgttgattgtatcatctcttttttcaggttaagcctttaatttgggtggaagcaagtgttgaaaagcattcaaagagtcggattgagattatggtaaaagctaggagtcaatttaaggaacgtaggtagtgagatttcttcttttcttatgtttgttatgtttcttcccccacccctctagatgatagaagatgagggaaatcaggttttttctgtctagaagttagactgcctcaactgtctttgcttccccaactaatagagtttattttatagcactgccacaaacgttgagattgagttgcctgtgcctgttgatgcaaccaatcctaatgttcgaacttcaatgggatctgcatcatatgcacctgaaaaagatgcattaatctggaaaattagatccttccctggaggcaaggtatgagttcacttggaactgacattgaatcattaaataacatccatcttgttacctcgttttgataatgatttattggatctggttttcctctctgatactttcaggagtatatgttaagagcagagtttcgtcttcccagtataacggatgaggaagcaactcctgagagaaaagctcctatacgtgtaaaatttgaaataccatattttactgtatctggaatacaggtattgctacataaacatggtttccttatattcagaatattgctaaactattttctcaacataagaaataaagtttgtttgtatctctgattaaatttaggtgaatgtttccctttattttaatcaacatcaacaatataactcttccctagttcccttccctctgtttctctctccatttgcctattaacattttgattgtgagaaatgctagcaacacactctcttgtacacaaactcttattatttgctggaatttattgaaaattaccaaatttgatgggtcccacaattcatttaatgactctctcctacttttgtagttttcaataaattttaatcaatagtagtgtgttaaaaagagtgtgttgctagcactcctcttttgattatttcaatggattgagggtggtagtgaactagatgaatttggtttagttcaaattattcccacaattcagttgatattaagaaattcacaataaatgtttataaatagtaatattaaaataaagaattgatagtggaaaaataacgggacatcagaaaaatattgaaaaaactggtacacttgattttattccattgtccatgacgaatagttttgaaaattagtttgtttggtccatgtgaaatgcaaagactaagaccatctgaatgaaacatgtgcagctacatgatataaataaaatttaccgcatattttgatggtgctgttcagttagctgatggtaatcaacatgtaaatgttttggttttataggtaagatatttgaaggttattgagaaaagtgggtatcaggctcttccatgggtgagatacataacgatggccggagagtatgaattaaggcttatttaagaacttgtatttttctttggtgctggaattccaccaaataacagggtcagcttccatgatcaatggttttaaagtggtggatgggagagggactcttgagagtgaaattagtatttggcctgatcatatctcctctggcgtcatgatagttttggcaacagatcgtaagttgctcattgtccataaagttcataacttcaagtctggaattggcaagtataaggttgtatcttctgtgtaagtccttttgttcgaatctgtttgttggcaaaatgtctgattttatttttcctcttgttttctattttatttacgatgatctgtcaatattttcccattgtcttcaatttgatttatttgtaagagaattattagcttttgtattactaagattgaatattttttcccctctttattttattcacaacctgacccttgtgtattaatatggtgccatatccttttctgggac

SEQ ID NO: 257 - DNA, 5001 bp, Glycine max
  source 1..5001: mol_type = genomic DNA
agacaacgacgacgttgtatagcagtccttcttcttctttctgtgttgacggtggcgttgatctgattggaattcaggatcaatggcaggggcagcctctgctctgttcctcctcgacatcaaaggccgcgtcctcatctggcgcgactaccgcggcgacgtctccgccctcgacgccgaacgcttcttcaccaaactcatcgaaaaacaggtttcaccttttcctctctcttgtaaacctaatttcgcattctcattctctagctccaagctcttcttgtttttctttttgttgaaggccgatccgcaagctcaagatccggttgtgcacgacaacggcgtgacctacatgttcatccagcacagcaacgtctacctcatgatagccaccagacataactgcaatgccgccagcctcctctttttcctgcaccgcatcgtcgatgtacgataatcattctcctttaaacctttccaaattgagaatttcgccattatttcgtataataattatggatccgtgtatttgtttctcgcaggtgtttaagcactactttgaagaattggaagaggaatcgcttcgggacaatttcgtcgtcgtggtaaaatatcaccgaatttagctgtctcttctttcttttcttttttggttaattgtgtgaatgtattcgttgaattgtattgtgtcgttggcagtatgagctacttgatgagattatggactttggctaccctcagtacaccgaggcgcagattcttagtgagtttattaagactgatgcttatagaatggaagttacgcagagacctcccatggctgtgactaatgccgtgtcgtggcgcagcgaagggataaactataagaaaaatgaggttagacattacaaaagtgaagatcgtgtctagctttttgaattgtaatttgatggcctaagtggtcaaattgtactttttggctcaggttttcttggatgtggtggagagtgttaatatacttgtcaatagcaatggacaaataattagatctgacgtcgttggggctttgaagatgagaacgtatttgaggtttgctttctacttttcgcgagatctattgaaattttctagctagtggtttgagatgggctgctaactgactaggctttctactattttgattgatctttctaccctcagttttctgattttctgtttgggtgcttctgttgtcgtgttcgcttgtgcatgctggttattggtgaggactgaagaggtgcattagggattagagaaccaagcctaagctgagtttttatattgaatttttttaaaactatttttgaattatgtataggtaaattttgaaaaatgtaaatgaaattagcaatctggacttgggagttcattcttttcctgtttttactttatgctgatgacacgtgcttgttgatatctttattcagtgttttaaatagcatgctatagtggcatagcagtgtggagatgcccctgctcgctagagggtctgccgtagcagatcaaatagccagctgaatagtggcactatgtgttgattctaaaaaaaggccctttgagcaaagacattagggcttttttggggagctatttttgtggatttcaatttccaaaaacaaaatctacagttgtaatagtaatgaaaaatgataaagtcttggataatatttcgaagatgataattgatgattcctatctagaaaacttgtatttgacttttgttggtatttacttgaatgttttgtttaagacacctatgactttttattgttaattatgaattgaatgtcattaattttgagtattttttttatcattttttgagaatatatgtatattttttttatacatcagaaataaaagagcaaaaagaaactagctcctaacatgaaccactcccattacatcagcagataaaaggggaattagctcagaaggagaatttaaccaagaaataaaactatcaacatggttggccccatatttagcaacccaatcagcacaaaagtttgcctctcttagagtgtgttgcaaactaacgttccagtctaaagctagaaggtcctgatacattatataaactatataaaaaaaatcaaaatagcagctatcccagtatagcgtttttggggctggccgctacacgttgctatctggggtttaaaacattggctttatttcctttgggtactccttagcccagaggctttctttaacaactcgtgctaaacataatacatatccactgcccatttgttaggtatattgcagataggtccaaccactgaatccatattatactccctactttttagggcgtgtttgggatagctgtgaaaattagattatttcaataatcgattatgggccaatttgtttaaacttatttgttgaaataagcagctttctgtttttagtgtgtttgtctaaactgtttttgcttaaaaaaagtagttttctgattattttaagaagcaaatcctatctgcttcttatataagcgatttttataaaagctcttattttagagttgtttttttaaagtttaaacaaactcaccctatatgtataatcgattataatcagaatcagttttttgtttgggtaagtttgctgaaaagcttttcgaaaataacatagctgagagttatttggaagattgtgttaaccatgaagtatttattattctaaccgacttatatgccagagtatttatctgaaaacaatgtgttgttcatggcttatctgatgcagtggtatgcctgagtgcaaacttggtttaaatgatagagtattgttagaggcgcaaggtagaacaaccaagggaaaggctattgacttggaagacataaaatttcatcagtatgtatgcttgacctcgttgtatttacaaactgatcatttagagaaaattttatataatttctttaagaatgtttcctcttcttgatgctagttctcaaattatatctggcattttatgaaggtgtgtgcgtttggctcgatttgaaaacgatcgaacaatttcctttataccacctgatggatcgtttgatttgatgacatacaggctcagtacacaggttcatctttttctctagatatgacataagtttctgttttgagaggtaaacacagaaagagagaataaaagaattttaaagtctctgttgactgtatcatctcttttttcaggttaagcctttaatttgggtggaagcaaatgttgaaaagcattcaaagagtcggattgagattatggtaaaagctaggagtcaatttaaggaacgtaggtaatgagatttcttcttttcttatgtttgttatgtttccttccccacccctcttgatgatagaagatgagggaaattaggtttttgctgtctagaagttagactgcctcaactgtctttgcttccccaactaatagagtttattttatagcactgccacaaacgttgagattgagttgcctgtgcctgttgatgcaaccaatcctaatgttcgaacttcaatgggatctgcatcatatgcacccgaaaaagatgcgttaatctggaaaattagatccttccccggaggcaaggtatgagttcacttggaactggcattgaatccttgaataacacccatcttgttacctcatttttatcatgatttattggatctctgatactttcaggagtatatgttaagagcagagtttcatcttcccagtataacagatgaggaagcaactcctgagagaaaagctcctatacgtgtgaaatttgaaataccatattttactgtttctggaatacaggtattgctacataaacatggttttcttatattcagaatatttctagactattttttcaacatacgaaataatgtttggttgtatctctgattaaatttaggtgaatgtttccctttattttaatcaatatcaacaatataattcttccctagttcccttccctctgtttctctctccatttgcctattaacattttgattatttcaatggattgagggtggtagtgaactagatgaatttgttttagttcaaattattcccacaattcagttgatattaagaaattcccaataaatgtttataaatagtaatattagaataaaaaattgatagtggaaaaataacgtgacatcagaaaaagttaaaaaaaaaaaataattcacttgattttattccattgtccatgattaataattttgaagagtagtttgatccatgtgaaatgcaaagactaagaccattggtgaaaataaaatttacctcatattttgatggtgttgttcagttagctgatgatggtaatcaacatgtaaatgttttggttttgtaggtaagatatttgaagattattgagaaaagtgggtatcaggctcttccatgggtgagatacataacgatggctggagagtatgaattgaggcttatttaagaatttgtatctttctttggtgctggaattccaccaaataatcgtgccaacttccatgatcaatggttttaaactggtggatgggagagggactcttgagtaaaattagagtttatttggcctgatcatatctcctcttgcgtcatgatagttttggcaacagatcgtaaattgctcattgtccgtaaagttcataacttcaagtcaggaattggcaagtgtaaggctgtatcttctgtgtaagtcctttttgttcaaatctgtttgttgggaaaatgtctgatttttttttcctcttgttttcttttcttttatttacgatctgtcaatctttgccattgtcttcaatttgatttatttgtaagagaattattagcttttgtattactaagattgaatattttccccatctttatttgtattcataacctgacccatcttgtgtattaatatggtgccatatccctccctttctgaacaaaaaccatgtatttttttaccattcattcaaaaagttgattgcaggtcaatg

SEQ ID NO: 258 - DNA, 7983 bp, Helianthus annuus
  source 1..7983: mol_type = genomic DNA
tccataaccaaaactcctcaaaccttcacttccattttcaacacaaaaaactaccgatcatcgcatctccaaatcatcttcaatttcacaaatctcactccacaacgaactaaaatctcatcgagctacacgcagattcatcgattgatcgatcagaaatcagatctgaaatctcaaacaaattcagcaaccgtacggatctgatccgtcgatggcaggggcggcctctgcgctgttccttctcgacatcaaaggccgtgttctggtgtggcgcgactaccgaggcgatgtttctgcagtgcaggctgagcggttcttcactaaactcatagagaaagaggttgatttgatttgtgtgttttgatttgattaaaattaaattatgaatttgtttgtttagcttctaatttgtagtgcaggcgtgttataaggtgagttgttagtatcgttagtttgaattatgcttgtttagtaggtttaggaattagatcgagcacttgctgatctaattggaaacgtaaaagtgtatactattgtttgactgtatgtttctgcatttatttgtttataatagattctgaatttgtttattaagctcctaatatgtatagcaggtttacgttaaactgagttgttagtattgttagtttgaaatatactttgtttagtaggtttaggaattggattgagaacatgtaaatctgatagaaaacttagaagcttgtactatctgtttgattgtatgtttctgcattttttctagtatactatattttgaatttatttactattgtcgtaagtgttttaaacctagaagtggatctatatgaagttcctgatttgtatagttatagcaggtatgttgaagtgagttgttcgcattgttaatttgaattatgcctgtttagtaggtttaggaattagatcggaaacatgttgatctagtagaaaacctagaagtttgtactctctgtttgattgtgcgtttctgcattttttgtatatattaaaatatagtaacaattaaaggcatagattctgaattcgtttatcatcgtaattcgtaagtgttttaaacctagaagtgaatcaatattaagctcctgatttatatagttatagcaggtatggtaaattaagttgttcgcgttgttaattcgaattatgcttgtttagtaggtttatgaattcgatcgaaaacaggtaaattaataggatacctagaattttagactatctgttataattataaattataaagtgtggtaacaactgaaccaaaggaatagtgaatgtgaattattgtttcatctggaattctggaccggctaggttaatattgtaaccaagtggccatccatgcttgttgatgttgaatttagtttttattgtttgtatgcatgcaaatgggtgcatctaatctgtttatggtgttttgatgaacctcagggtgatcaagacgctcaagatcctgttgtatatgataatggtgtcacctatatgtttgtacaacacaacaatgtatatctgatgactgcatcgaggcaaaactgtaatgctgctagccttctcctgtttctacatcgtgtagttgatgtaagcactgttggtaactgaatcaattaaccattattttttgttgtttgtaacttaaaaatatatcgtcactttgctcataaactctttaaacttatttttaatgatacttctaattaatacgtgaagcaaaattaagcttctaacattaatcaagttcttgtttgttgttggtgacaggtatttaagcattactttgaggaactagaggaggaatcacttagggacaactttgtggtcgtggtatgcatattttgcgatatattctcaggaaaatgttgattttttttttgaaagcttaaaccctacggacttccattggatttgcatataagtcaccggactttgtttttgcataatttagtctgaacacataaaaaatcaatgtaaagtctctttatataaagtgtagggacttgattacgcaacaaagggcatatttttcgtgtttctataagtctagggatttaatcatgcaggaaacatatatgtcaaaaataaagtcaactttttcatagagtttctgtaagggatttaattatgtaaaaatgatatctaaggacttatgtgcaagttttagcgaaggtacataggctttcttgcggacctatattctcactagatatgtcactatagtgtcactaaatccaggggatgtaatcatgtataaataaaatacaaggacatatatgctcactaaatatgacactataagaggggcaaaacctgaagcattttgatatgttacagtatgaattgcttgatgaaatgatggactttggttaccctcaattcacggaagctaaaattctcagcgagtttatcaagaccgatgcttacaggatggaagttacacagaggcctcctatggctgtcacaaatgcagtgtcttggcgtagtgaagggatacgatacaagaagaatgaggtaggtctttctgtcagagctagataattaggagtatgaaattacaaaaaaaataaaaataaaatctttttgtcttgttcaggtgtttttggatgttgtggagagtgtgaatatactcgtcaacagtaacggtcaaatagttaggtcagaggttgttggggcgctgaagatgagaacttatctgaggtaatatgatttacacttgttcttttgctagatatcgtataccatcctatcactgtccactgaactagttgtagatattctttttatcatgtcttgtctataatgttaagctgtaacctttagacatttaaatgtatataatttctatatgctaatgagcttgttctaggtcttctagtaggagttttgacgtaaagataattcttgcctgattctattgagattagaagataattttgattacctgacttttttgaccatattcttcccacctaaaaaaatactaataataacaactaacaagccttgtcattaatatcaatgagaataagaaatcatagctatacatgaaggaatacttagggagtaataagaaatgtatgttgtatgagagtatattctgaattctactgctcatatgaaagagctgttgaacttaagttttaacaggagatgatacgatacacacgtgtgagcagaatgtgaaccgaatacaaacttgggattttttgaaaattgagtcatgtttgttttgttgatctggatagatttctgcacgccagtactattatgtcactctccaacacggttgcttaaacatgtcgaataatcacataattttgtgcaactactaaatagtgatgtgtcattacttgcagtggtatgcctgagtgtaaacttgggctgaacgatagagtactattggaggcacaaggacgatcttctaagggaaaagctattgacttggatgacatcaagtttcatcagtatgtctttaaacccttcattgttaaataaccctgtgcagttaatgaggtaaaaaatcggatatcggtcgaagaccgatatttgagatataggttatcacggcggaatatcggtaattttaataacattcaggaaatatatatagagagaaagtgtaatgtacaatctggcttaacgtacaatgcgtacgatgtgaggattccgcatgttataaacttttaaacgtccaaaaccataaagccgcatgttgaaaatcgttaatccgcatgcagaaaccaaatccgcatgtttatgaccaattccgcatgttgaacatcaatccgcatgtttgaaccataaatccgcatgacccagtatccgcatgttataaacccaaatccgcatccgcatgttatattttcacatcgtacgttaaggccaattgtacgttaactaacccctatatatatatataaatagagagtgagagagagaaatttaacactaacaattcagtatactctcctattattaataaattaatcttttgcaacttgcaaacactaacaattgtagcaagtaggaactgattaagactttaaccacttacatttaacaatgaagacttcaaacactaatacgaacaataagaagaaagatgaatcatgaatggtagaactaagaagaaaggtactgatatcgggaaaattggtatataccggtcgatatcgccgataatactggtaacaatattctggccgatatttgacaccgatattttacatggggactgataaccgatatatcatagatattaactgcatagattttaaccataacatttgtgaaatcattttatatttaaaaaatggtgttgaaacatataatattaatatattataatcatatttaacagaataacagactatttacataaaaatgataaaaattagggaaattttatgggccaattctggttatatgggtcaaactggtgaaacttaaaaaacatattagaaaaggaaacaggtctaatggggtttaaaatgacccgttaccagcctgcttaattcaccacctctaatttttaaccattttcgcacatttttgttgcgtttatcactatctgctgctagattcagtcaatatgcaattttgatataggtgcgtgcgtttggcccgttttgaaaatgaccggacgatatcttttgtacctcctgatggagcttttgacctcatgacatatcgactaagtactcaggtactttgcagtttcttccatcaccaccaaaaaattaacaataaacatccctttttacctaactatattggattttggtgctttctttcaggtaaagcctctaatatgggtggaagctcaaattgaaaggcattctagaagccgtatggaaataaccgtgaaagcacggagccaatttaaggagcgtaggtattaatgcttccagtgtctaattttctagctgctgtttaaagagttgaaaatgccaactctggtttaatctattgctttgacaatgcaatctttggttaaatctattgcttctttttcatggtattgctttggcaatttcatctcatttacttataaatgggttgatttggctagtgttttatctctcatgcatcaaacggtaaaataaaaaaagtgatccaataaccgacccatttaaagttcgggttagttcgggacaggttgttcggttttttatttagatgtaaatgaaaataaatgtttttttttttacaaaaatatcatcaaaatttatattgctattaaaaatatatcatcaacattcaaacatcatttgacaatataatattataatgttcaaaagtctcaaaacttaggtagtgtgcgtttcacataattgaatggaatcttgatggaattggaattgaacaacataaggaaaggaatctacattccaattccatccaaatttcattccattttgcaaaacaaacacacctaaattacaaatcaaatttcaaatttctgcgcgaattcccattccaattccatcacaatccaggaaacgaacagtaccttaatgttccagatactagagactccaaaccaaaaagcatttataaaaacaataaatgttcagtttttttttcgggtttcgtgtttcgggtttttggccagatataagtgacccgataaccaacccatagaagattcgggttggtcaggttcgggtttttcaggtatctctagtttgggttcgggtgactttgaattcgggtcgggtttcagataaaaatggacagccctactcacttcgcactccattttgctacctctaggattactgtctaaaaaataagaacatttaaatttgactgttttgactttgcagcactgcaacaaatgttgagattgaattacctgtgcctgctgatgcaaccaatccaaatgttaggacttccatgggatcagctgcctatgcaccagaaagcgatgcccttagctggaaaataaaatcatttccaggtggcaaggtaaaccttatatatatgatatggtgttcatctacacttaccaatttcatgtgttgaccaagtcaaagttaaaaattctgttggatattttaggaatacatgttgagagcagagttcaaacttcctagtataacagcggaagaagcagccccggagagaaaagctcctattcgtgtgaagtttgagataccatattttacagtttcaggaatacaggtaacccttctcagtttctccttttgcattttgggtcatgttttttttttttttttgaagtaacaagtcaagtttagtgagttaaattttaatgtagggaaaactacatgaaatagaaatgaacttccaccttttttagattgagtaaaatggcattttcgtccctgaggtttgggcagttttgcaactttcgttcaaaggtttgtttttccgcatctggatcaaaaaggtttaaaatctctccgttttcatccggcttgttaactccatccatttttctccgttaagccaggggtatttccgtcgtttttgttaacttaaagagcaactcggtctttttcacttaaagggcaatacttgtactatatgctaaatgcttgtacataaagtgaaagaaaccgagttgccctttaagttaacgaaaatacccctgacttaacagagaaaaatagatggagttaacgagctagatgaaaatggcaagatttcaaaccttttggatctagatgcgaaaaaacaaacatttggacggaagttgcaaaacttgtcaaacctcagggacgaaaatggcattttactcgttttagaagctagctttaaactaggcactgccatgcaaatagaaacaaacttccgatttgttactgattttagcaatatctaaaagttacaagttcgaaacattgattttttctataataatatgtctaaaagttagaaaatgtcaaatcaaataccgtgtggcatataatacactaaaatgagtcatgacgcaatatcttatgccataactctttgaaaaataacatttaagtgtaagtgaccagctacaccactatcagtaatctttccacaccacagttttctctcattctagtattccacacacgcttaacacatttttttccgcacgttttagtgttatttacataaatcatttttttctttctagttctcagataagttgtaagacatagggttcataatcaacacaactcgacttgaaataaatccttgctactcgtatagttttgctgatttttttttttacttttatagtatattacaaagaaaaaaatgaaacacaaatcgtcattttagctctataagtagggtccataatcaacatgactcgccttgattaagctaatatacattcttttggattttacaggtccgttaccttaaaatcattgagaaaagcggttaccaggctcttccatgggtgcgatatataacaatggcaggcgaatatgaactaaggctcatgtgaaaccttattccaagcaagtgttttgtatttaaatacatttacaatttaaatgagttgttcgtcaagcaaaaattttactctcatgcaccggtttttgtatttgttgtgcacaatcatcagtaatctttactacgattgaatataacacaattcttcatgttttaggttagaggtgatggatgaataagttgagtgattgagtaaacgtgtttgggctagttcgccatccatttagtgttacgaggggtccataagatgtagacataaacgtcttgatgggtggatgttgtgacaaacagccatccgactttcggaagaaaattcgtttgtttagctcttggacaccttttagttggttttcttcagttttagtattgttttgatttcattttcttgtaaaaacacactatttttgtttgatttcatttctctttgtaaaaacacagtatttttatttgatttcattttcattgtaaaaacacgtgaaccatggattttattaaaacgtattt

SEQ ID NO: 259 - DNA, 7349 bp, Helianthus annuus
  source 1..7349: mol_type = genomic DNA
ccgggttcggggtttttttttttttacctcacgggtgattgagctgcgtcatcatcaccagctcgagatttctttatgaaagacgctgataaagcacacagatagatcacgaaatccgaaactcgttttgcgaattcgagcagttacataacatctatcgttcattcacaagctgatcgatcggaaactagatctgaattcgaaatcaaacaagacggatctgatctatgtcgatggcaggggcggcctctgcgctgttccttcttgacatcaaaggccgtgttctggtgtggcgcgactaccgtggagacgtttctgctcttcaggccgaacgtttcttcaccaagcacattgaaaaagaggtattaataatattatcatcttcattgctcttttttataccatcaataattgtagttagaaggagaagtaaaacacaattactttgtaaactaggctaattaggttaagaattaagatgaaggaaattgtattgtttgtttcttagttaattttggggggttttaggcttcttataggccagttttggatgttttagaccagtttacccggaatttgcagaaagttgcccaaatttggctaaaattttgccggaatctgatagaaatatggcctgaatcttgcctgaaggtcgctggagcgtctggttggcagtagggagattttcctgcacctcaccttccggaagggcttttgaatgttggtttatgaaatcctgaatgatcattattgaatgagtaggttacaatttatagagattacgagcatggccggccctgagggtgggcggggaggaccaccggccagggcccgatatttcgaggggcacgtttttttctgaaaaagaacccgatatgtatttgtaaaatatttttttaatagggtacactcatacaaacaccaacataggctcccttacaaaactattcttatggtttagattagttattaacctttttggcattagatttagacctttagtgagcccgatacccaatttcgttaaggcctacgggcacattttttcgagctcgaacatggtacacgaattctcagggccggcccagattacgagtaagcctagtaacctaactgagcccgtgggcccataataatatagtctaatattgacaacataggtagtgagtatgagatctctttagttgagctcaatattttgatgaataaatatgtttgttgagttctaacttgacatggtttttgtagttttattttatttcttaactagaagtacttttgttacgttaatctcacaaaagtatattgagaatttgagattaaggtttaattttttatatttattattaatcatggagctatgtaaaataagtatgttaataactagtttttaagataatatggatcaaagatagaatagaaagaatacagaagatgggtaagtaggtaacagaagataaaagagggaggctatttcgaagcaattttcaacgtaccttcaacccgaaacatcacattcacatgccttaataggcttacaaagaaaacagaaacttaactgacacaaattaaaccactactacactaacccacttatattcattaacataaaataaaagcaaaggaaatgcatgaaaataaacggaacatgggatgatgcatgggttacatgagaaggtggtacatatcataagattttggtgttttgatgaacttcagggtgatgatgctggttctcaaggtccagttgtgtatgacaagggtgtcacttatatgttcattcaacacaacaacttatatctaatgacggcttccaggcagaactgtaatgctgcgagtcttcttctgtttctacaccgcctcgttgatgtaagtggcatttgttggttgtattattcagtaagatatttatcagattattgttgttaacttgttattggtaacaggtatttaagcattactttgaagaattagaagaggaatcacttagagataactttgttgtagtggtacgaaactataatcatttaataatatttactcacactatcggaaggaaacgcgttcaacaaaggcttataatttcgtgcagtatgaattgcttgatgaaatgatggactttggttaccctcagttcaccgaagctacaattcttagcgagtttatcaagaccgatgcatataggatggaagtttcacaaaggccccccatggctgtcacaaatgctgtgtcttggcgtagtgaaggaatacattacaaaaagaatgaagtagggctacttttgtaattttgttaggtgattattttgatcagcttatacatgtatatgttttttccaggtgtttttggatgttgtggagaatgtgaatatacttgtcaacagtaacggacagatagtaagatcagaagttattggagcattgaagatgcgaacgtatttgaggttgatttatttatctttatttgcatccatttgtatccgtgtttcatttaccacaataaacttgcatgaaatataaacaagcttttatgtgaaaataacttaaaaaaattgtataaaatttgaaaagcgatcattaaaagttatgtctgataataactgtatcttggttgctgaaattagtaataaactataaatttctattttgtacgctaaaatctggaaagatgtaaagtttgtctatattttgtgcattttttttccctataatgtgttatacttgagccaagttacaaatactatttgtgataatctgttataaaataataagggctgcaaacgaaccgaacgaacacaaacaagaccttgcccgttcgttaaggaaatatatgtgttatcgttcacgaactgttcatgaacgcttatcgaacaagattttatgttcgtgttcgttcattaaagaaatgaacgtgttcgtgttcgtttgttaattttaggcattgaacgttcatgaacacaaacggaaacaaaggacacaaacaagagttcatgaacataatctaatgtacattgatacttattaaatattttatttgtctgtatctaaataaaaataaaaactaaaaacactaatgaactatcgaacacaaacgaacacgttactgaacgttcacgaaattaaatgaacgaacgcggcctcagttcatgtccgttcatttattaaacaaatgaacacaaatgaactcccgccgaacggttcacaaattgttcgctgaacgttcggttcgtttacaaccctaaaaataattgattgtgcgtttattggttgcagtggtatgcctgagtgtaagcttgggctaaacgatagagttttattagaggcacaaggcaggactactaaaggaaaagctattgacttggatgacatcaagttccatcagtacgttttcttaaatattaaaacatgtacttataaatgggttagtttgggtaatatttatttcgctaggtcatatggtaaaataaaaataaaaaacttcacttaaaaaggaaacaaccaaatttaattctaggatgaatattgaaggtgacggtttcaagttgaatgggtagatctcgattatgtttatttcttaacgggtcaaatcatgagatttaacgtaaaaggaaatgagtcaaattgctcaaatttggggtatgcttttatctctagtgagcaaaacgagccaaatcaataaatttagcgaaaaaaggaaatgtttcagttattcatcatgacccatactacaacgttacccatgttgacccattacccaacccgtctgacccatttggccacttctactacgtatgttacgtatatataggtatattttgtttcctttttgttatcgttatctgttactagttttcagccaatatacaaacttggtgtagatgtgtgcggttggctcgttttgaaaatgatagaacaatatcatttgtacctcctgatggagcctttgacctcatgacgtatcgactcagtactcaggttgctttcccaactcctacccttatatatttctaatagttctaaatttcatgtgtatccttagaagttttataatatcacatataccatttcaaaccactaacaataatctactcattccatggtttcttttaggtaaagcctctaatatgggtggaagctcaagtagaaagacattctaaaagccgtgtggaaattatggtaaaagctcggagccaattcaaggagcgtaggtacacttttttttagttatgaaaagctgtctagagaagaatataggaggtgtcagttttgaccatttacttatgtatgtgtggtttcggggaatggttgatctataactggccaaatcatgatatttggcttacaaggaaacacgtcaaattagtcaattttggttataaggctttatctctgatgggtgaaataggcaaaaatgtgccaattgggttaatttgggtttctattatatctaattaatcaattatagaaaaggttattggattttaataatcaaactttaaccaattggccggcaataatcccaacttaaaatatttccccctgccggtcccacctttcaagctattttcctccaccaaacctttactaaatgaggtctaacccagttagtgttttgctgacatggcagcttatgtggcacaaaacctggttatttgttgatgtggtggtgatggtggtgtgttagatatagtttgtaataagaggggttagattgtaataatgtgatacttggggggttagttgtctaattgtaatagttgtaacagtggtagttgttagttactataactaccaggttggttaatgagaaggatagtaactaacaactaccactgttacaactatttcaattagacaactaaccccccaagtatcacattattacaatctaacccctcttattacaaactatatctaacatggtgggtggtggtggtggcggcagacggtggttgtgggtggtgatggtgatggtgccatataagcttccacatcagtaaataactgccacatcagcaaaacactaactgcgttagaccccaattactgaaggcttggtggaggaaaatagcttgaaagttgggactggcaggggggggggacttttaagttgggattattgccggccaattggtcaaagtttggatattaaaatccaatgatccttataaaaatagctaaaacggaaatggatgaaacttgaaagtaacctaaagtatatttttattgcatacaatcgctatattcacaaatttagattgatattgttactagtttgatatcatttatctatgaagggacattttttcaaggcaatcctacccgaaccgttgtgccacataaagtattaactttgaccgaagccagtttggttcatttccaacccgcccttttcacctctaataaaaatactgattttatctcatgagaataatttgattttgcagcactgcaacaaatgttgaaattgaattgcctgttccagctgatgctattaacccgaatattcggacctccatgggatcagctgcttatgcaccagaaaacgatgccctttgctggaaaataaaatcttttccgggtggcaaggtaataactttcttaccatatcctaaaattctccttatatatcaattcactaacaaaaccttcattttctcacaagatttgagttgcctttttgttgacttgcatctctcatgacaatatgacatattcattttactgaattcttgcaatatgttagaagttattgttatattattttctgcttctcgtattacatataacatatgattcctgtcatcattgttgctgttaacatgttatttttttttacatcattatatttatattttaattattattattaatttttttattattagagttaattactgttttcgtccctgtggtttgtcaaaaatcactatttcagtccattagtttaaaaattgcgatttcagtccctgtggtttcactttcgtaaccatttcagtccaccttgtaaccatttcagtccctgtactaaacagaataatggattgaaatggttacgaaagtgaaaccacagggactgaaatggttacgaaagtgaaaccacagggacttaaatcgcaatttttaaactaatagactgaaatagtgatttttgacaaaccatagggacgaaaacagtaattaactcttattattattataaacagatggatttacgctttttttcacaatatgaaacgattttttttgtgaatattgtggtaatcaattctaaaacacttgattgctcctattttatcgcccagtttctgctagttgaccaagtcaaagatgaatttcttatgtttgccataaattgatcgctttaaaacttgtataggaatacatgttgagagcagagtttaatcttcccagtataacagccgaagaagcacttcccgagagaaaagctcctattcgtgttaaattcgaaataccatattttacaatttcaggaatacaggtgaactctcctctctagttttctacagggcatgttcaaaatagataatcttttactgtggcccgaccctttagacacctgtccctatccgttttgttgataaattgattacaaaataatcttgttttttaagtaagcgatttaggaggtatttatacatatgaataccctcggtttactttcacttgttagttaatcctttggaattttacaggttcggtacctgaaaatcatcgaaaaaagtggttaccaggctcttccatgggttcggtatataacgatggccggagaatatgaacttagacttgtgtgagaatgaaccaatgtagtttttgtaagcgaataggttttagttggtgtgtttttttggcacaattgttgtttcatggactaaagaagaaatttgtaagatgtgatgttgtgttgttcctctttttaaactaaatctttggtgaagcgactaagtaattgatgatttgatcaagccatagccgattaaccgaaaattgtggtttgatttcagttttatgtgcaaaagctcatgttactaaagggaacgtttttttctaattcattagacttttagtgagttagagccccactatacctcaacaaatgacgcccgtgaagccaattcaacatacaagtgaagggcgttaaagggttggtggtgttaatcccttaatgtgctcaattttacaaaccggagttttgccacaatgcatgcgtggcctgtggggatgggattacaaatttagactttgccacctcatccccgttggggacgctcttagtgagggaggttttaactgtcacgtaggcagtgtggctttcattaactacacatt

SEQ ID NO: 260 - DNA, 3803 bp, Helianthus annuus
  source 1..3803: mol_type = genomic DNA
ccaaatcacatgtcctcaatgtttctagcattcatatattactaaattcataggtgaccacactctagattcaactgcattttcttcaccattgtcacatcatcaacaatattcctgtatctatctatctatctatatatcccatcgttggattgacgcaaaacaatggctggagccgtttcagcgcttttcattctcgatatcaagggccgctgtttgatcagtcgtcactatcgtggtgatattttatccgttgaagccgagagattcttcacaaaacttcttgagaatgaggtataataattttatgatattattagtatggatggatccaattgtatgcatataacaaaatttcagtttctaggtttttggcaagcaaatcggttttcgttatagcataaaacgattaatgtagactatagttattattatttgatttatcgttcatctataatttttttgttcgtaactattttaaatccggtttgaatattaggatagttagtgacgttttatcattaccgttagctagttaggcttataaatttataattagtttgttagctttatcattatccttttcattacaatctctttgtataatggaacaaatatgattcatgaagtaagttcatgctaatttagggacaaatgtgttttcttttttttttttttttttttttttgtgcatttgatttatgtcaggaagatattgaggctcaaggtccagtagtatttgataacggcgtgtctcacatattcattcgacacaacaatgtatacttaatggctgtatccaggcaaaactgtaacgttgctagcctcattgcatttctccacaagttagccgatgtgagtactaagattaacgctttattaccccatggttatacttatggtttacgcttggattcgcaaaaatgggttgttttcatttttcaaaacccatgatgatgaatttcatattatcatgtcattaattatttctaaataaattataaatttttttcaggttttcgagtattatttcgaagagttggttgaagaatctcttagagataactttgttgtagtggtaaaaatgaaacccttcattacacttcagttaagttaaccaactatataaactcatacttagcaaaatatggcagtatgaattactcgacgaaatgatggactttggttacccacaatataccgaagcaacgattttaagcgagtttatcaagactgacgcttataggttggaagttacacaaaggcctccaatggctgtaaccaatgcggtctcgtggcgaaatgaaggaatatattacaaaaagaatgaagtatgcaccttttttgtcaatatggtcattgatattaacattaacattgcaatgttatctttttctcttttgatatcaggtattcctggatgtgattgaaagtgttaacatactagtcaatagtaaccgacagttgattcggtcagaagttggcggggcgttaaagatgagaacgtgtttaaggtgcttaaaaattatggctcacaacaacaaagtcgataagtttatcatgtaacactatcaacattaatctaaagtgtgtgcgcacaccacggggggggggggtcattgaatacacaactaattttaagtaaagaactgtgagaattgcgtaaacatttgtactcgttactttacttgtgatccctttctttgtaccactatatatgattaacgctacgcacaagtatttatacggttaactgaagttttaaccatttcgtgcagtggaatgcctgagtgcaagcttgggcttaacgatagagttctaatggatgcacaagatcggtcttcaaaggggaaatgcattgatttagaagacatcagatttcaccagtaagacatcaatagagacattactagcgtatgctataatttggtcgtttacggatctaaacactcttcatgcttacttgattgttgctttcaatagatgtgtacgtctagcgcgctatgaaaaggaccgcacaatatcttttattcctcctgatggatcatttgatctaatgacatataggattagcactcaggttatcttcagttgcatcgcgcttgattcatatttcatacaccctttttcgataattatcaggatttcagattttttatttttaattttttatttgctgctaggtgaaaccgttaatttgggttgaggctcaaatcgaaaaacatgcgagaagtaggattgagatgcttgtaaaagctagaagccaatttagagagcgaaggtacgcctcatgtaattaacgtttatctgatcccaccagggtattggtggggcccgtgagttttccctaacgagttctcatggccacaattttttttttcattttcgtgatacaaatgagttttcttagtcgaattatgaggcgatctaataactaatgtttaaaaacagtaacgcaacaaatgtccaaattagcatacccgtgccatccgatgctacaaaaccaattgttcgaacaacaatgggagccgcttcatatgctcctgaacacgattcgcttatatggagaataaggtcattccccggtgacaaggtaccaaataatgtttggaattttatgaacattttttttttttttttgcattgttgtaaatgcttcttgttgtcataacaccatttgagcattaacaattgcaggagtatatgttaggggccgagtttagactcccgagtgtcgcttatgaagatccaaccccaaacaaaaaaactcctatacgtgtgaagtttgagataccgtattttactgtatctggtatacaggtatgcatttttactagtggtggcaatatcggcgggccaaataggttgagtaacaggtcaaaacatactgtcaaaatgggtcacgtcattggtttgacccactaacacttttttgtccttcatttggaaaaaactataaaaaaataaataatgattacttataataataactagtatttagcatccccacattgcggcggaggcgtaaaaccgtgtcaaatagtagcaatgtcacaccaccgtgagcgaccaccaacactgagtttgcgacgtgttaatacgaagcaattagactgaaacgtaaatatagaaaataaaaataactaagtccatctaggactcgcacattatgaagaacttgtcaaacgggaaaaatagacaacataaaaacgtcgaaccacacacgcacattgcattgtgttaactctcaaaacttagaaagagatgttgaaccacacacactttacgcctacacattggagtacaaccccttattcctacaaatgttaatttgtatgtgcttaaaagtgatttatggttgaaagtaaaagaagttaaacataaaagaacccaaatatgagtacaactcactaaactatgagtacaatccttcatgcctacaaatgttacaaatcgatattatataaataataataataataataatctttaaataaaatgatttagtggtgtgtgtgcatccctttcaagccttgactagtttgttaccgggccgtttagttaaaaatatttatttaacctgtgaacacggcctgaattgacgcattcattagtcattactttacggttgcaggttcgtcacctgaaggttatcgaaaaaagtgcttaccagacactaccatgggtgagatacataacaatggctggtgaatatgaaataagactacagtgaaacccgggtcaaactcgagagttgaccagtttccatatgtgaaataagtctcaactcttaactgctactt

SEQ ID NO: 261 - DNA, 8131 bp, Sorghum bicolor
  source 1..8131: mol_type = genomic DNA
aaaattatggaaagtctgatccagcgtgtgttgcaaaggtgaaggacttgtacaaagagcttaaactggaggtttgtctgaccattccattttcttaggatttattgtttcgagtcaaccatgtaagcatcacggttcattgttattatctggaaacaattaaatccaacatatgatggtcatgatgcactgacctggttaaaggcactgaaacaatgcccatattgtttgcttgtggctgtatgcatttacgtttacatgtggctgatccccaacactctgtgttccgtatatgtgctgttttgctgacgtcctttcctgattgatacaaatccaggaggttttccatgagtacgagagggagagttacaacaagctgattgccgacatcgaggcccagccgagcaaggcagttcagactgttttgaagtccttccttcacaagatctacaagagggacaagtagacccagatcgtggagaagctgctccatcgacgcttgcatcaagttactatacttgattgatgcggtcgagtaatttgtactatgttgttttgtgttttcattctcctgttgtaccgtacacctgaatataataaagcacagtgctattagggatgtgtaaccagcttgtgtcaccattcaccaacgcatccacagttcctgggttgttcgtccttctcaactccaaaaggatttgagaagacgtcgagtgttgataagcagagctgcgcatgtatctcttctgtgattttattcagcaattactgatgccaagattgcttctttgcccccccttttcttgtttggtttaattgattgatgatactaccatagctttgataattgccattggtttcttgcagttagtacttggccgagttgcttgccgcacaccaggagttcgggccatgtgctgcccatatgcaacaagatgctgagccacggtcagatcctttgatttctgccttattatttcctgcagcctaaatgcccgatgagattgccattgctagagaggctggaggaacaaaaggacttataatagaagcaacacgaccatgttaatgaaagaggtgatcgcaatacaaagttctatcaccagtatgcattggagaggaggaaaaggaacagaatatgattattgctacaatgatgtatgtaggcctgctgaaatattgttaagaattttgttctggaagcatagagttgatatgtggtgtttatcgcatttctcatgttaatcttaggcttttgccttttgacattgttatttcctttttttaaaaaaaatatcttttagttttttccatagcgttagcatgggtaaatatacgtcgtttaaaggaaggcaatgctaatacttgcccctttgatcttttcagattcatgctaggcaccttaggaggagaatttcatctccaaactgattgatgaggaaatgttggttactggtcatgacgataaagcaaagataattgatgatttcgatactgttggactcttgggcactagtaaagactaggactacactattaatccgaacgacttgagcatcagctttggtgatttggctgatcttgacgccccattttctaaagatgtttgggagacaatttgttaactatggggttcgcccctcacttcatacgttatcaatagaagtacttcaattccacctttcattgacgagataaccgattgtatcttgtgtggaaaactgagttgtttacctaggctagtgtaaagtgctagtgcaatttcttttcgcctcaatgctagtttatccagctatggtagtggtcagtggatctccttgcatgggctatcaaggaaaattgatcaatatggagattcttatttggagatacaaaagatgtgaatggagagcactgctttgttgcatgggctgaccatggtcttagcatcttcagtttttagcgcatgagttaacgattttgatttaatttatatactttatacttagggtaggattgaagttcctaaaagatacatcgaaactactagttaaaacaaacaatagaataaaagtgtgatcaaggtttatattgggtttcagatatgctctattgaagtaaatgatgatgtcatcatgtagggttttattctcaatcgctaggtttggtgacatcaatcatgtttcacaaagctaaggatttgtctagtcaaatcaaggaagattgtctcatgatgttcatctagcgatatcacattcattctattgacggttgctggatttcgaatgatatgtgttgtgctggctaggttctattacactgaataaaaaatctgggtcttttgtgatatatggaaaatgaacatctttttgatggtctcttccgtcaaggttccacaagaaattagcaatcaataatagaggatgcatatgaaaaaaaaaacatgagtgccaaggtactgtaattttcttcctccttttctagggtttgtttgccaacatagaaactctagacttatttaaacaatttttatttctagcataaatcggaaggcacctttcaatatcgaaaaaagaaaacacctttcaaatgaaagatctttgtggcatattgctctagcttcttgcaactctttgtggagacaagcaaaatggccattaaaaacgttccttataaacactgagaaggaatccaagtcaatttttttttcgaggagccggaactggaaaatacatttttcttgtcgctcttcctcacaagaattaatataaactattataaacttactatatgagcttttttgtcaaatatttttcttaaaaatgatttcagctctgaaaaattgctccatagaacataggatcaggagaccctaccaaactagaatatcggtacaactacaagtgtacaacccaggtgtgcctgaaatgtgaaatgctggaaaaatgcttcgctaggactagcatccaggccccaccgtccagtgggacgtaagaaagacacccggatcctgcgctctcctcaccctctccacttccgtttccgggtccttgcgtttccaacttcgatccaacccaagcaccggagaccgcaccgcgccgcgcgagcacgtcgggcgccggtgcggcaggcgagatccgagagcactcctcccccgcgcccccgcacccgcatggccgccgctggccgcagatagagaggcgcaggcgggggcgtgcagatccagatccggtgggcggcgaggacgatatcgcccccccaccaccatggcgggcgccgtgtcggcgctcttcctgctggacatcaagggccgcgtcctcgtctggcgcgactaccgcggcgatgtctccgcgctccaggccgagcgcttcttcaccaagctcctcgacaaggaggtaagtgggcgatcagccctcgcgccccgtctgctgtctactcctgagatctgtgcggccctggtgttgagttctcgtggaatgggtagggcgactcggaagtgcactcgcctgtggtctacgatgacgctggcgtcacttacatgttcatccagcacaacaatgtcttcctcctcaccgccgctcgccagaactgcaacgccgccagcatcctcctcttcctccaccgtgtcgtagatgtacgtgccctcgccccccttgtctgcagagaatcattgatgacattgtgccgcctgttgttcatgctacttgtgcgtgagtacaggtgtttaagcactacttcgaggagctggaggaggagtcgctcagagataacttcgtcgtcgtggtaagcaaaatttcaagtacttcttctgtttgatgtgccattgctgggatttgacagaatggggtgcccattttgtgtgtacagtatgagttgcttgatgagatgatggattttgggtacccacaatacacggaggcgaagatcttgagtgagttcatcaagacagatgcatacaggatggaggtcacgcagcgtccacccatggccgtgacaaatgctgtgtcatggagaagcgaggggatccggtacaagaagaatgaagtaagattcactatttactatctctctttttcatgcaggcaatcagttctgtgatggtacttgacaaaccactgcactttgtatctacaggtcttcttggatgtagtggagagtgttaacattctagttaacagcaatgggcagattgtgagatcagatgtggttggtgcactgaagatgcgaacatatttgaggtgagtttgcattgtcagctttttgacattgtcttgctaaacattattaaacactaacttatcacatgatcacacagctaaataagtgtgacctataatttaagcccttgtagaattctgttattcaaacaagcgatcaatttattgttctaattttttttttatagaaaacagcttgcattgctatgggcaaatttagtcctgagatctactggttttattctgtattggggtatcacaccagggcttttattactatggcttctctttgttatgatgtagattagtgatcgaaagagatgaaatttttaaatttatgctcaaggatgttagttgtccagtgttactagttctgattacagttatttttcttgctagcttatatgctcaaatctttgttccaggtatttattttgtaattatttcacttctggtttttgtgttttcctttttgatggaacctgcttgaaatttctactttacatgactttgcttcatttttgtttctttttattttggaagcttgtatattttcctagccttgaagagtctccatctttattttccttgcaagctattgatagttttgtcatgcttatggggtataatataagtttataaccgtacaagtcttgaaatgagtcacagagaacacaatgaataccctgggattgccaggtatgcatattgttgggatagaattttattaatgctataaatattttgatatattgtttcattagctagcaattgcttttgtcaacttcaaagtttacttaagcagaaaatgtctccttcactgttatcttagataatagataaatgtattgatcttaggagatatacattgtattcccttctgtgaattcttgtattggaccggcgtccagtacatacgctggcgtactcgtggctagaggctggcccacataaggcgcctggttgagatgggctatcagcccaattatctttatttactatttgtaatttatatttatcccaaattggttatttagcaaaataggttgcatagaaggggatataaatatttgtaaattctattgaaagaattaagcagaagcaactaaattggttgctagcttcctcaggggccctagctgcctctctcactcactctcacctgcgccgtgcatcacggcgccagttcgccgccaacgcttccctggacctcgtcctctcctcttccacccctacaaccttcgcagcaactccggcaggaatcctagtcctaccaactaatatattcataagcaagttaacaaaggttgaaatctcaatcagcaatcactatctaacaataaaatgtcaaaaagaaggtttagatgtctttaccagggtgagtatactacaggaaattgactagttgtgaggtcaataatttatttatgtatttttccctagaaatattttaatgattttttatatcagtattcagatagatgtttacttgttgaaacatgaagtgagataaacttggaaggtgaaaaatacatagtttatgctcgtaatgtttgtactgcacctaattcttatttgtggtgtacttctctgtctccaaataagtgtcattctcatttttcgaggagtcgatgaaccaatttagaccaaatatataaaaaaaagtactactccctccattccaaattataaggcattttggctttttagatgcaataatggagggagtaatatttattaggtgtaataagtatcattattagactagagaatatatttccataattaacctatttggagatagaaatgttgataatattttctataaatagatgttcatttgatgtatttagtccaaacctagaatgacattctttcagggacggatgtggtatagatgttggttgtgtttctattttaatatgtcgagaatagctggactggagagtggagactcatggtctactttaaaaacaagatgtacgcaatgagaatggtgttattattttcatttgacgtattcttcttcatgatattaaaagtgatcctgccagctagggtttttgaactactcattttacgcagccacacttaacattcctcttgcattcagaaatacacatacgttgccctaacagtgagacattttgaaacagtggaatgccggagtgcaaacttggcttgaatgatagggttcttttggaggctcaaggcagagcaactaaaggaaaagcgatagaccttgatgatatcaaatttcatcagtaagcaaaaaatattgctcttttcttcaccaagtctgttgcatcactaattcagtgtgaccattttcccttctcctttttaggtgtgtacgtttggctagattcgagaatgacagaactatatcgttcatacctcctgatggatcttttgatctaatgacatacaggcttagcactcaggttctcttcctgatcaactctggaatgctttatagaagatatgaattgttttcactttatcgttttcacatgcatgtctttatttgatgtcctttaggtaaaacctcttatctgggtcgaagcacagattgagaaacattctagaagccgtatagaactcatggtgaaggcaaggagtcagttcaaggaaagaaggtgagcgctatttacaaaagcaagatttgcttgtgtggcaggaatgggcttttttaaagaatgggtttcttttttccatttacagcacagcaacaaatgttgaaattgaagtacctgttccttcagatgccacaaacccaaatataagaacttcaatgggttctgctgcatatgctcctgagagagatgcaatggtctggaaagtaaaatcattccctggtggcaaggtaattactatccaattccaaattaattcttttttccatgttattgctattttgaagtgtgctaatgtgctgaagcaatccatcctataggaatacatgtgcagagcagaatttagtcttcctagcataacagcggaagaaggggcccctgaaaagaaggcgccgatacgagtgaaatttgagataccatatttcaccgtatcaggtattcaggtaataagtttgctgtttgaagatgtttgtctattgttctacttcctctgttccaaattataagatgttttggctttatacattacttttgctatgtaactagacacagtgtacatctaagttcatagcaaaagctgtgtctaatccaaaacgtcttatttggattggagggagcagcattctttctattgtatcttatctggaatgttcagctactgaatggtgcgctatattgtacattgtgcaggtccgttatctgaagataattgaaaagagtggttaccaggcactcccctgggttagatatatcacaatggctggcgaatatgagctgagacttatatgagttttctcctttctggctgctggaagacatttatgaagctgcaagatacatatttgctctgagacacagcaaccagttggcatttgtatgctagcctggaagtcttctgccgaccatacaaggttttcccccttggggcttgttcatcttgttaggctcaccttaccttggttattgtaagttacccatcaagtatagttttggaaaaaagagaggataattttaattttcagttcacttgtattattattgatttatttttgtgggtaccaaacttggatttgtttcattctgtatttacacgggcagatttgagttcaacaaaacactgccataactgggtgatgattctgaactgcaggttgaaacgattttgcccttctttactgtaaatgtcgttgtcatgtatccaggcaaaagaaagaaaacctaccgaaacttactgtgacttctttagtttcaactatttttgtttccgagaggtcaacgacgctggttcgttggaactat

SEQ ID NO: 262 - DNA, 2703 bp, Brassica napus
  source 1..2703: mol_type = genomic DNA
agctcattcttctctttgacgttgctccttacataaaattcatcagatctcgtggattaacttcttctgtttgatcggatctgatatcgcaatccctagagaaaaccatggcaggggcggcctccgcgctgtttctgctcgatatcaagggccgcgtcctcgtgtggcgcgattaccgtggcgatgtcaccgccgctcaagccgagcgtttcttcaccaaactcatcgagaaagaggttcctctacgattactcttcccatctttgatctctagatgtgcgatttggtggatttgtattcacatctctgatttctagacgtttcttatgagattctcgtgaataaacatttggaacgaattagcaaagcttgatcagttgttatacgattgatattagattagaatttgatcagttgttatacgattgatattagattagagtttgatcagcattaatacattgcgattctccttggtggttttgttaatgttattggctaatctttcagggagattcacagtctaatgatccggtggcttacgataatggtgtgacctacatgtttgtacagcatagtaacatttacctcatgattgcctccaggcagaactgtaacgctgcgagtcttatctccttcttgcatcgcgttgtcgatgtaagcttccctaacaaaaagagcagaactttttgaaatgacaccgatcatttacctgtttcttatactgattgtaggtgttcaagcattactttgaggagttggaggaagaatcattgagggataactttgtggttgtggtatgttaatgcttctaccttctgctcttgatgaatattagatgctgaagttggtttgtgttggtggcagtatgagttacttgacgagatgatggacttcggttaccctcagtataccgaagcaaggatccttagcgagttcatcaagactgatgcttatagaatggaagttacacagagacctccaatggctgttactaacgctgtttcatggaggagcgaggggttacagtttaagaaaaacgaagtagatgcttttgtttagaagggaatggtttatttttatatcgtttaggtctccaaatgtttacaaacggctgttttgtttcccaggttttcttggacgtaatagagagtgtaaatatccttgtgaacagtaatgggcaaatcgtgaggtctgatgtcgttggagcattgaagatgcgaacctatttgaggtgtgttttctagtgttcttctaatgttagatcaaacttccctcctctttgactctctgcttcttaatccatggttattacagtggaatgccagagtgtaagctaggtctgaatgatagagtactgttggaagcacagggacgagcaacaaaaggaaaagcaattgatttggaggacatcaaatttcatcagtacgctttcctcttgctaactccaaacattctctgacagtcacttatccagaccactgttttacaatacttgagttctacatgtgtcttgacaaatgcaggtgtgttcgattggcccgttttgagaacgataggacgatatctttcataccacctgatggggcttttgatttaatgacgtatagactcagtacccaggtttgaaatgtggaatattgcatggatggctttttcttccttcttaaacaattaaaaatctcatgaaattttctttcttttttacattatacttgttcaggtcaagcctcttatatgggtcgaagctcagatagagaggcattccagaagtcgtgttgagatgctagttaaagctagaagccagttcaaggaaagaaggtaactactaatccttgtctgactttgcttgatatctactccatgtttttaccataaagtgataaaacgttaattttctacagcactgcaacgaatgttgagatcgagttgcctgtaccaactgatgcatccaaccccaccgtaagaacatctctagggtctgccgcatatgctcccgaaaaagatgctctggtttggaaaatcaaatctttccctgggaacaaggtaagtgcttataacttttaaatagtttttaaacgtaagaactgaccatataatgttgagtgtcttgactttaagttttgaaacaatgtaggagtatatgttgagagcagagttccatcttccaagtataaccgcagaggaagccacacctgagagaaaagctcctatccgtgtcaaattcgagatcccttacttcactgtttcaggaatacaggttagtctatcttgggaattttctatgtttctgtacttgttatctgaaaccttgaaattgaagaatcctaatgcgtgtgttaatgcaggttcggtatctgaagatcattgagaagagtgggtaccaagctcttccgtgggtgagatatataactatggctggtgagtacgaactcagactcatgtaacatgagatctgtgttgttttttgttttttatttacgccatttgtcaagaaaacaaaccagaggaagatcaaagaaaaggaaaaaagatttgaaaattttagctgatgaaaattacggtgaatgttggtttagagatctatatttcttgtgaattgttttcatggtgttctctctttatttttcctgtaagctcttttacgacaattattttggttaaaattgttaaacaagcaattttgtttggtcctttagtggc

SEQ ID NO: 263 - DNA, 3137 bp, Brassica napus
  source 1..3137: mol_type = genomic DNA
atggaactgaatataaaaggatttgtgccgagtcaaagcgtgagtttttgggtgtgagtttgattgtttgtcaaaaggaaaaaaaaaaaggttttgaaacatgtacagaagattttttcagccacttcaactgcatttgtatttgttctcttatatcaccaatgtaaggaaatattggaagctgtgatatatactatgtgaaatgtctttagtatcttgattacatgttaaagatctcaataccattgagaaagatcaatttgcagaagttagaatgcggaattaaactactgatgatcaaagaagatgataaagtactttaccaactctgctaaatacgacgccgtttcgatgaagtaaattaatcagtttattactttattttaatgttgtgtgtcgtcgtctctctctctctctagctattatgaaatcgtcagatcgtgaataaaaagccttttatcgagctgctaacggatgatctcagctcattcttctctttgacgtttgctcagcgtaaaattcgttagatctcgtggattaacttcttctgtttgatcggatctgatatcgcaatccctggagaaaccatggcaggggcggcctccgcgctgtttctgctcgatatcaagggccgcgtcctcgtgtggcgcgattaccgtggcgacgtcaccgccgctcaagccgagcgtttcttcaccaaactcatcgagaaagaggtttctctactcttcccaatctttgattttctagatgtgcgatttggtggatttgtattcacatatttgatttctagatgttccttatgagattttctcgtgaataaacatttggaacgaattagattagagtttgatcagtgttaatacaattgcgattctccttgatggttttgttaatgttattggcgctaatctttcagggcgattcacagtctaatgatccggtggcttacgataatggtgtgacctacatgtttgtacagcatagtaacatttacctcatgatagcctccaggcagaactgtaacgctgcgagtcttatctccttcttgcatcgcgtcgtcgacgtaagcttcccttgatattcaatttttttttttgcaaaaagaacacttaactgtttcgaattgataactgatcatttgcgtgtttattaggtcttcaagcattactttgaggagttggaggaagaatcactgagggataactttgtggttgtggtatgtcactgcttctcccttctactctagtaatactctcttgatgaattcacatgaggcaaacaaatattagatgctgaagttgtggcttgtgttggtggcagtatgagttacttgacgagatgatggactttggttaccctcagtatactgaagcaaggatccttagtgagttcatcaagaccgatgcttatagaatggaggttacacagagacctcctatggctgtcactaacgctgtttcttggaggagtgagggcttacagtttaagaaaaacgaagtaggtgcttagtttacaagcagggaacattttgttttttgtattttgtttaggtttccaaatgttttacagactggtgttttttggtttctaggttttcttggacgtaatagagagtgtaaatatccttgtgaacagtaatgggcaaattgtgaggtctgatgtcgttggagcattgaagatgcgaacatatttgaggtgcgttttctactgtatcaactaaatcatgttagataaaaattcacttctcgttgactctctgcttcttaatccatggttattacagtggaatgccagagtgtaagctaggtctgaatgatagagtactactggaagcgcaggggcgagcaacaaaaggaaaagcaattgatttggaggacatcaagtttcatcagtacgctttccacttgctaactccaaacaatctctgacagtcacttatccggaccactgttttgagttctacgtgtctttcttcaaaatgcaggtgtgttcgattggcacgttttgagaacgataggacgatatctttcataccacctgatggggcttttgatttaatgacatatagactcagtacccaggtttgaaatgtggaatattgcatggatggctttttcttccttcttcaacaaattaaaaatctcatgaaattttccttcttttttacattatacttgttcaggtcaagcctcttatatgggtcgaagctcagatagagaggcattccagaagtcgtgttgagatgctagttaaagctagaagccagttcaaggaaagaaggtaactactaatccttgcttgatatctatgtttttaccataaagtgataaaacgttaattttctacagcactgcaacgaatgttgagatcgagttgcctgtaccaactgatgcatccaaccccaccgtaagaacatctctagggtctgccgcatatgctcccgaaaaagatgctctggtttggaaaatcaaatctttccctgggaacaaggtaagtgcttataacttttaaatagtttttaaacgtaagaactgaccatataatgttgagtgtcttgactttaagttttgaaacaatgtaggagtatatgttgagagcagagttccatcttccaagtgtaaccgcagaggaagcaacgcctgagagaaaagctcctatccgtgtcaaatttgagatcccttacttcactgtttcaggaatacaggttagtatatcttgggaattttctgtttctgtactcgttatctgaaaccttgaaattgaagaatcctaatgcgtgtgttaatgcaggttcgatacctgaagatcattgagaagagtgggtaccaagctcttccgtgggtgagatatataaccatggctggtgagtacgaactcagactcatgtaacatgagatctgtgttgttttttgttgttttttttttttttatttacgccatttgtcaagaaaagaaaccagaggaagatcaaagaaaaggaaaaaaaagatttgaaaaatttagctgatgaaaattacggtgaaatgttgttttgggatccatatttcttgtgaattgtcttcatggtgtttctctctttatttttcctgtaagcttttttatgacaattattttggttaaaattgttaaacaag

SEQ ID NO: 264 - DNA, 2714 bp, Brassica napus
  source 1..2714: mol_type = genomic DNA
gaatctgaatcgagcaaatcgtcagatcgtgaataaaaagacttttatcgaaaccagtcaagctgcagcacgatgatgatgatgatgatgatgatctcagctcattcttctctttgatgctgcatctccggccaagcaataaaattcttcagatctcgtcttccgtttgatcggatctgatatcgcgcaatccaagagaaacaacatggcaggggcggcctccgcgctgtttctgctcgacatcaaagggcgcgtcctcgtctggcgcgattaccgcggcgacgtcaccgctgctcaagccgagcgtttcttcaccaaactcatcgagaaagaggtgtttaactccacgattgctcttcccaataacaattataagattatcgtgatttaatctgtattgatgagttttgcttatgtggttcatagattagagtttgaatcagtaatcaatacaatttatgattctccttgtggtgaggagttttgcttatgttggttgatgatcttgcagggagattcagagtctaatgatccggttgtttacgataacggagtgacctacatgtttgtacagcatagtaacgtttacctcatgatagcttccaggcagaactgtaacgctgccagtcttctcttcttcctgcatcgcgttatcgatgtaaggcatccaatccccctttatgatctgtttctaatcattttacgtgcttttttttgttttaatactaatttgtaggtcttcaagcactattttgaggagttggaggaagagtcattgagggataactttgtggttgtggtaatgttactgctgcttctcccttgatacctttcttgttatttctcttgatgaatctatgctggtggggaaaacaaatatgttagatgatgaatttgaattgtgttggtggcagtatgagttacttgacgagatgatggactttggttaccctcagtatactgaagcaagaatccttagtgagttcatcaagactgatgcttataggatggaagtcacacagagacctcccatggctgtcactaatgctgtttcgtggaggagtgaggggttacagttcaagaaaaacgaagtaggttcttgcttagtttacaagcaggaagctttttttgtttatttatattgtttaggtctgtaaatgttgatgttttgctttccaggttttcttggacgtggtagagagtgtaaatatccttgtgaacagtaatgggcaaattgtgaggtctgatgtcgttggagcactgaagatgcgaacatatttgaggtgtgttttctagtgttctatatcaagcaaagcatgttagatcaaaactctctctgttttgactctgcttcttactctatggttattacagtggaatgccagagtgtaagctaggtctgaatgatagagtactgttggaagcacagggacgagcaacaaaaggaaaagctattgatttggaggacatcaaatttcatcagtacgctttcctcttgcaactccaaacattctctgacagtcacttcttatccggatcattgttttttttaccgcaataaaatatactatgcttgagttttacatgtgtctttcttcaaattacaggtgtgttcgattggcccgttttgagaacgataggacaatatctttcataccacctgatggggcttttgatttaatgacatatagactcagtacccaggttcgaaatgtgaaatactgcgcggatggttccccccgtgcacaaagtaaatctctttcttacataatatttgttcaggtaaagcctcttatatgggtcgaagctcagatagagaggcattccaggagtcgtgttgagatgctagtaaaagcgagaagccagttcaaggaaagaaggtaactagaatcgtttgtgtgtgtgactttgtttgatttttacctttacgataaaaaaaaaagtttcaataagagttgctttcctgcagcactgcaacgaatgttgagatcgagttgcctgtaccaactgatgcatccaatcccaccgttagaacatctctcgggtctgcagcatatgctcccgaaaaagatgcattggtttggaaaatcaagtctttccctgggaacaaggtaagtagtgctaatgatttttttaatgtgagaactgactatataatgttgtatgctctgacactaagttttgaaacaatgtaggagtatatgttgagagcagagttccatctcccaagtgtaaccgcagaggaagccacgcctgagcgaaaagctcctatccgtgtcaaattcgagataccatatttcactgtttcaggaatacaggttagtaaatatatacagtatcaggtattttctatgtttctgcagtcaaaccttttaaactgaagagtcctgatgggggtgttaattatgggtattacaggttcggtacttgaaggtcattgagaagagcgggtaccaagctcttccgtgggtgagatatataaccatggctggtgagtacgaactcaggctcatgtaatgtgagactgttgtttcttttatatattttggtaagccatttgtcaaagaaacaaagcagacgaagatcgaggaaaatggaaaaaaaatttagctgataatttttttttacggtgaaggttgtttaaaaagcccatatttcttgtgaattgtttcttagtgttctctatatgtttcctgtaaggttttttttttttt

SEQ ID NO: 265 - DNA, 3051 bp, Brassica napus
  source 1..3051: mol_type = genomic DNA
aagatcatcagatcgatgagaagttgattgcgaaaatggaaaatctcagcagtgaaagatccacctcattccccttctagattcagctccatcgaagcataatttcatcagatctcatttgaatcagattcacatggcaggagctgcttctgcgctgtttctgctcgatattaaaggtcgcgttctcgtctggcgtgactaccgcggcgatgtctccgccgctcaagccgaacgcttcttctctaagctcatcgagaaagaggtttcgttttcttgattctttagatcaataggtttgttcataggattagagtattcatttctcaattatgttgtgtgtctgattggtcacagggtgattcacagtcaaatgatccagtcgcttacgataatggggtcacttacatgtttgtccaacacagtaacgtttaccttatgatagcctccaggcagaactgcaatgctgccagtcttctctccttccttcaccgcgtcatcgatgtaagttaattcttctgctgcttttaaggcgtaaatacacataagtgtattgctgttacatatgattgaagtggtgatgtgatctatataggtctttaagcactactttgaggagttagaggaagaatcactcagggataactttgtcgttgtggtatgtttacttcttccatagttcttatcaatgttcaagaaatcgctaggcgcagtagcgactatgcgaataatacggtaggcctagacattaacgaaatattgatttattttatatatttctatgtttatatgagatattttagtttttgggtttagttgcaaaagtattatgatgaattatcaaaactagatgcacaaaacaaaagaaattagataaatttgtggatttatagtaacattattgcttaattttacatatttagactgattttaactgatttagaacagtttaaaccgatttgaatcgtataaatcggagtttaggaaaatgttttcggctaagactaggctctgcctagaccgatttttaaaacattggttcttatactactatttggctatttattgaaattgatttatggtgattggcagtatgagttacttgatgagatgatggactttgggtaccctcagtataccgaagcaagaatcctcagtgagttcatcaagactgatgcatatagaatggaagtcacacagagacctccaatggctgtcactaatgctgtctcctggaggagtgagggattacagtacaagaagaacgaagtgagtgcttttgttttcaagagaggaacatgttgttatccatctgctgtgttttttttggttttgcaaatgattacagcctctctgctcttgtttctccaggttttcttggatgtaattgagaatgtaaatattcttgtcaacagtaatgggcaaattatcaggtctgatgttgttggagccctcaagatgcgaacttacttgacgtatgttcctaaatcatttgagatgtcatcccccttttgctttgatctttgtcttgccattttatctgactctttttctctttgatccattccattgcagtggaatgccagagtgtaagttaggactgaatgatagagtattgttggaagcgcaggggcgaacaacaaagggaaaagccattgatttggaggacatcaaattccatcagtatgttttttaagctccagtgatcattacccttgtaaacgattctatatgtattcgttttcttctacgcaggtgtgttcgattggcccgttttgaaaatgataggacgatatctttcataccacctgatggtgcttttgatctgatgacatatagactcagtactcaggtttgaactatggaatatagcatggataggatttttttcctcctcctcaacaaattttatttcatgatattatcttttttcatactccttggttcaggtgaaaccgcttatatgggtggaagcgcaaatagaaaggcattccaaaagtcgtgttgagatgctcgtaaaagctagaagtcagttcaaggaacggaggtaaatatattttatggcactatgtcacttttgattgtctctttcactttaatgcacatatcttgatgatcagattctttgaacatttgatttgagaatttttttaatttgcagcaccgcaacgaatgttgagattgagttgcctgtaccagccgatgcatctaaccccaccgttaggacatctctggggtctgctgcttatgctcctgaaaaagatgcattggtctggaaaatcaaatctttccccgggaacaaggtacatgcttttttccttgatacagttgaaaccatcagccatctagtctcaatgttaacctctagaaaaacaattataggagtatatgttgagggcagagttccatcttcccagtataactgcagaagaagcaacacctgagcgaaaagctcctatccgtgtcaaattcgagatcccttatttcactgtctcagggattcaggtaagctagtttgtttccacatcttctgcattttaagcacacaccccaatgcgtaaactgcccttccataagtgattaaacttccatgtactaaataatgctggtgtgtggtgtaggttcggtacctgaagataatcgagaagagcgggtaccaagcacttccatgggtgagatacataaccatggctggtgagtatgaactaagactcgtctaaggctcattcggcttttatccttttatgccaattgtgattcccacattcctccgggaatcaatgaaacgaaacaaaacaggacacaagtagagcaaaataaacgttttgaaacttttttttagccgatcaaatctgccttttaagttttttttttttaatttgacttttgtagtcgtatccttgttaattatctttatggtgattttatttattttacatatggccctttgtaacctttcacgacatggttccttcttttttaactccagctacattctgtctgtgttctgttcttcgatcaaaattgttaaatgatgatattttggttcttgtc

SEQ ID NO: 266 - DNA, 2936 bp, Brassica napus
  source 1..2936: mol_type = genomic DNA
agactttcatcgaaaaccagtcaagctgcagcagcatcatgatgatgatctcagctcattcttctctttgatgcccgacctccaatctccggccaagcaacaaaactcctcagatctcgtcttccgtttgatcggatctgaaatcgcgcaatcctagagaaacaaaaaaaatggcaggggcggcctccgcgctgtttctgctcgacatcaaaggccgcgtcctcgtctggcgcgattaccgcggcgacgtcaccgctgctcaagccgagcgtttcttctccaaactcatcgagaaagaggtgtttactcaacgattactctccccaatcttcgatctctatagtaacaaatataagattatctgtgatgatgagtttgtttattgttcatagattagagtttgatcagtaatcaatacaatattttgttttgaaaaaatgttaaattaattcaaacaaaaaatactgtttacaacctttgcttgttttaagctaaaaaaatgttaaattttttacaatcggggcttttagctctagtggtaaaggggttacagctgtgaataccaccacctgagttcgaatcccgaccactagggaattaacatttcggcatcgtcagagacagagtactgacacgtggtaacacgtgactagtctggatcacttctgtgcctttgtataattcaaaaaaaaatcaatacaatctatacttctccatggtggagttttgcttatgttggttgatgatcttgcagggagattcagagtctaatgaaccggttgtatacgataatggagtgacctacatgtttgtacagcatagtaacgtttacctcatgatagcttccaggcagaactgtaacgccgccagtcttctcttcttcctgcatcgcgtcatcgatgtaaagcatcagtccatcccctttatgatctgtttttcaaatgatgccgtgctttttttttttttaatactaattttgtaggtcttcaagcactattttgaggagttggaggaagagtcgttgagggataactttgtggttgtggtaatgtccctttgatactttcttcagatgctagattttgttatctctcttgatgaatatatgttggtgttggtgttggtggcagtatgagttgcttgacgagatgatggactttgggtaccctcagtatactgaagcaaggatccttagtgagttcatcaagactgatgcttataggatggaagttacgcagagacctcctatggctgttactaatgctgtttcgtggaggagtgaggggttacagtttaagaaaaacgaagtatgtgctttagtttgcaagcaggaaactttttttttttaaatattgtttaggtctgtaaatgttgatgttttggtttccaggttttcttggacgtggtagagagtgtaaatatccttgtgaacagtaatgggcaaattgtgaggtctgatgtcgttggagcactgaagatgcgaacatatttgaggtgcgtatcaagcaaagcgtgctagatcaaaactccctcctctttgactctctgcttattaatccatggttattacagtggaatgccagagtgtaagctaggtctgaatgatagagtactgttggaagcacagggacgagcaacaaaaggaaaagctattgatttggaggacatcaaatttcaccagtacgctttcctcttgcaactctgaaacattctctgacagtcactcatcaagaccactgtttttcttttactcaagaaaatatatatatacttacatgtgtcgttcttcatattacaggtgtgttcgattggcccgttttgagaacgataggacgatatcattcataccacctgatggggcttttgatttaatgacatatagactcagtacccaggttcgaaatgtgaaatactgcgcggatggttccccccttgcacaaagtaaatctcattcttacataatatttgttcaggtaaagcctcttatatgggtcgaagctcagatagagaggcattctaggagtcgtgttgagatgctagtaaaagcgagaagccagttcaaggaaagaaggtaactagaatcgtttgtgtgtgtgactttgtttgattttaccttttaagatataaaaaaaaagtttcaataagagttgctttcctgcagcactgcaacgaatgttgagatcgagttgcctgtaccaactgatgcatccaaccccacagttagaacatctctcgggtctgccgcatatgctcccgaaaaagatgcattggtttggaaaatcaaatctttccctgggaacaaggtaactgccaaatgattttttaatgtgagaactgactatatgatgttgaatgcttagacactaagttttgaaacaatgtaggagtatatgttgagagcagagttccatctcccaagtataaccgcagaggaagcaacacctgagcgaaaagctcctattcgtgtcaaattcgagattccatatttcactgtttcaggaatacaggttagtaaattttctatgttctgcagtcaaatctgaaggcaaaccttttaaactgaagagtcttgatgggtgttaattatgggtattacaggttcggtacttgaaggtcattgagaagagcgggtaccaagctcttccgtgggtgagatatataaccatggctggtgagtacgaactcaggctcatgtaatgtgtgactgttgtttcttctatatattttggtaagccatttgttaaagaaacaaagcagagggaagatcgaagaaaatggagaaaaaatttaagctgataattttttttactgtggaggttgtttaagaagcccatatctcttgtgaattgttatcttggtgttctctatatgtttcctgtaagctttttttttatgaaacttccaatttggttaaattgttaaacaaagagtttttt

SEQ ID NO: 267 - DNA, 2666 bp, Brassica napus
  source 1..2666: mol_type = genomic DNA
agatcatcagatcctttgtgaagttcagttgcgaaaatgaaaaatctgagcagcgaaagatccacctcattctccctctagattgagctccatcgaagcgtaatttcatcagatctcatttgaatcagattcacatggcaggagctgcttctgcgctgtttctgctggacatcaaaggtcgcgttctcgtctggcgtgactaccgcggcgacgtctccgcggctcaagccgaacgcttcttctctaagctcatcgagaaagaggtttcgttttctgattttgttgccttgtgtatagtttctgtagaatcggaaaaatgttgaattcatctatgaggttaagaagattctttagattaataggtttgttgattggattagagtattcatttctcaatatgttgtgtgtcagggtgattcacagtcaaatgatccagttgcttacgataatggggtcacttacatgtttgtccaacacagtaacgtttaccttatgatagcctccagacaaaactgtaatgctgccagtctcctctccttccttcaccgcgtcatcgatgtaagttaattctcctgcttttaaggcgtacattcacataattgtaatgctgttacatatgatagaagtggtgatatgatctatataggtcttcaagcattactttgaggagttagaggaagaatcacttagggataactttgtcgttgtggtatgtttacttcttccgtagctcttttactactactattttggctatttattgaaattgatttatggtgattggcagtatgagttacttgatgagatgatggactttgggtaccctcagtataccgaagcaagaatcctcagtgagttcatcaagactgatgcatatagattggaagtcacacagagacctccaatggctgtcactaatgctgtctcctggaggagtgagggattacagtacaagaagaacgaagtgagtgcttttgttttcaagagaggaacattttgttatccatctgctgtgtttttttttggttttgcaaatgattacagcctctctgctctttatttctccaggttttcttggatgtaattgagaatgtaaatattcttgtcaacagtaatgggcaaattatcaggtctgatgttgttggagccctcaagatgcgaacttacttgacgtatgttcctaaatcatttgaaatgtcatcccccttttgctttgatctttgtcttgccattttatctgactcttttgctctttgatccattccattgcagtggaatgccagagtgtaagttaggactgaatgatagagtattgttggaagcgcaggggcgagcaacaaagggaaaagccattgatttggaggacatcaaattccatcagtatgatttttaagctccagtgatcattacccttgtaaacgattctatatgtattctttttcttcaacgcaggtgtgttcgattggcccgttttgaaaatgataggacgatatctttcataccacctgatggtgcttttgatctgatgacatatagactcagtactcaggtttgaactatggaatatagcatggataggaattttttcctcctcctcaacaaattttatctcatgatgttatctttttcatactccttggttcaggtgaaaccgcttatatgggtggaagcgcaaatagaaaggcattccaaaagtcgtgttgagatgctcgtaaaagctagaagtcagttcaaggaacggaggtaaatatattttatggcactatgttacttttgattgtctctttcactttaatgcacatatcttgatgatcagattctttgaacatttgatttgagaattttctattttgcagcaccgcaacgaatgttgagattgagttgcctgtaccagccgatgcatctaaccccaccgttaggacatctctggggtctgctgcttatgctcctgaaaaagatgcattagtctggaaaatcaaatctttccccgggaacaaggtaaatgcgttttttccttgatcgagttgaaaccatcagccatctagtctcagtgttaacctctagaaaaataaatataggattacatgttgagggcagagttccatcttcctagtataactgcagaagaagcaacacctgagcgaaaagctcctatccgtgtcaaattcgagatcccttatttcactgtctcagggattcaggtaagctagtttgtttccacatcttctgcattttaagcacacaccccaatgcgtaaactgcccttccataagtgattaaacttccatgtactaaatgctggtgtggtgtaggttcggtacctgaagataatcgagaagagcgggtaccaagcacttccatgggtgagatacataaccatggctggtgagtacgaactaagactcgtctaagaaaacgagactgttttggaacttttttttaagccgatcaaatcctatgccttttaatttgattttagtagccatattcttgtgaatgatcgttatggtgatttttttaaatttattttacatatggccctttgtacctttcgagacatggttcttttttaactccagctattttctgttcttggattgttaaatgatgatattctgatttttgccttttggggtatatgttactgtaatatatagctaccaaga

SEQ ID NO: 268 - DNA, 4763 bp, Zea mays
  source 1..4763: mol_type = genomic DNA
ccaaaaggattctgccatagtgacctttcttagaatacgcagaaattggcataacaagaactccacattaaaagaaataattgaaacaaaaaaaagttgaaattattgatgtcataataggtctcggtaggtttcctttcttttgcctggatacaagacgacgacatttacagtaaagggcacaattgtttcaacctgcagttcagaaccatcacccagtaatggcagtgtttttgtgaactcgatcagatgaaacaaatccaagtttggtacccacaaaaataaatcaataataatacaagagagatgaaaattaaaattatcctctctttttttcaaaaactatacttgatgggtaacgtacaataaccaaggtaaggtgagcctaacaagatgaacaagcccccagggggaaaaccttgtgtggtcggcagaagacgtccaggctaacattcaaatgtcatacggttgctgtctcgagcaaatatgtatcttgcagcttcataaatgtcttccatcagccagaaaagagaaaactcatataagtctcagctcatattcgccagccatcgtgatatatctaacccaggggagtgcctggtaaccactcttttcaattatcttcagataacggacctgcacaatatgcaatatagtgcatcattcagtggctgaagattccagatacatatcttttccagatacaatatacaatagatagaatgctactccctccattctaaattataagacattttggattttccagatacatatcttttgctatgaacttagatgtacactacatagtaaaagtaatgtatctataaaaactaaatcgtcttataatttgaaatgaggaagtacaacaatagacaaatatcttcgaacagtaaatctattacctgaatacctgatacggtgaaatatggtatctcaaatttcactcgtattggtgccttcttttctggggccccttcttccgctgttatgctaggaagactaaattctgctctgcacatgtattcctacaggatggattgcttcagcacatgagcacacttcaaaattgcaatggacatggaaaaaggaattgatttggaattggacagtaattaccttgccaccagggaatgattttactttccagaccattgcatctctctcaggagcatatgcagcagaacccattgaagttcttatatttgggtttgtggcatctgaaggaacaggcacttcaatttcaacatttgttgctgtgctgtaaacggaaaaaagaaacccattctttcaaaaagcacattcctgtcatacaagcaaatcttgcgtttgtaaatatcattcaccttctttccttgaactgactccttgccttcaccatgagttctatacggcttctagaatgtttctcaatctgtgcttcgacccagataagaggttttacctaaagaacatcaaataaaggcatgcatgtgaaaatgataaagtggaaacatttcatatcttctatagagcattccacagttgatcagaaagagaacctgagtgctaagcctgtatgtcattagatcaaaagatccatcaggaggtatgaacgatatagttctatcattctcgaatctagctaaacgtacacacctaaaaagaagggagaatggtcatgctgaattagtgatgcaacggatttggtgaagaaaagagaaatattttttgcttactgatgaaatttgatatcatcaaggtctatcgcttttcctttagttgctctgccttgagcctccaaaagaaccctatcattcaagccgagtttgcactcaggcattccactgtttcaaaatgtctcactgttagggctgtagatgtagggataaaatcagatacttattcggatatcattttttggtctttttctttgattgtgaataaataggatatagaatctgctatgcaaattcatattcttgtttttagcattgaccttgtaaagattcataaatggtaaacctcaaatttatcatatatattctcaaatgatagatataaaattcggatacagatacatttatccttttttactgtagggagcaaataatgtataaaacaatttatgcaaaattttattattatttgtaatagtgtgcttggtaacataagaacatattagcatcaaatttcatacatatctatttaaaatattaaattgtcctaacaattcagatacccactttcatccctatatatatatgtgtgtatagtacatctgaatgcgagaagaatttaagtgtggctgcgtaaaatgagtagttgaaaaaccctagttggcaggttcgcttttaatatcatgaagaatacatcaaatgaaaatgagaaaactcgcattgcatacatcttgttttcaaattagacagcgagtctccaagtccagctattctcaacatactaaaacagaaacacaaccaacatctattaactaaataccacctccgtccttgagagagaatcattctaggttccgactaaatgcatctattaactaaacatattaaatgaacatctattcatagaaaaatcatcaacatttatatatccaaatagattaaatgattaattatggaaatatattccataatttaataatgatacttattacacctaataaatatcagtactttttgtatatattgggtcaaatttgattcattgactcctcgaaaaatgagaatgacactcttttggagacggaggtagcaccacagtccacacaaataagaattaggtacagtacaaacattatgagcgtacaccatgtgttttgcacctttcaagtttatctcacttcacggtttgacaagtaaatatctatctgaatactggatataaaatcattaaaatattttaaggcaaaacacaaataaattattgacctcacaactagtcaacttcctgtagtataatcaccctggtaaatacatctaaacattcttttgacattttattgttagatggtgattgttgattgcgatttcaacatttgttaacttgctaacaaatatatagtatttccagttatcaatacaagatactcttccccagaccccgcacagtgcgggaagcctatggcactgggtacgcccagttatcaatacaagtattacagaagtgaaatagaatcacaaaataaatgtcctgaacaaagatttgagcatataagctagcaagaaaaataactggaactagtaacactggacaagtaacatcctcgagtttcaattcaaaattttcatatatttcgatcactaatctacatcataacaaagagaggccatagtaacaaaagccctggtatgctatcccaatccagcataaaatccgtagatctcaggaacaaattcgccgacagcaatgcaagctgttttctattaaaaaaatagatcaacaataaattgatcacttgtttgcataacagtattctacaaggacttaaattataggtcacatttatttagttgtgtggtcacatgacaatgcaaactcacctcaaatatgttcgcatcttcagtgccccaaccacatctgatctcacaatctgcccattgctgttaactagaatgttaacactctctactacatccaagaagacctgtagatacaagtgtggtggtttgtcaagtgccatcacagaactgattgcctgcactaaaaagagagaaggtaaatagtaaatcaacatacttcattcttcttgtaacggatcccctcgctcctccatgacacagcatttgtcacggccatgggtggacgctgtgtgacctccatcctgtacgcatctgtcttgatgaactcacttaggatcttcgcctccgtgtattgtgggtacccgaaatccatcatctcatccagcaactcatactgtaagcacaaaatgggcgccccattccgtcaagtcccagtaaccgcacatcaaacagaagtacttgaaatttgcttaccacaacgacgaagttatctctgagcgactcctcttccagttcctcgaagtagtgcttaaacacctgtactcacgcacaagtcgcataaacgacaagtggtacaatgtcatcaacgattcacttcaaacaggggggtgagggcacgtacatctacgacacggtggaggaagaggaggatgctggccgcgttgcagttctggcgagcagcggtgaggaggaagacattgttgtgctggatgaacatgtacgtgacgccggcgtcgtcgtagaccacaggcgagtggacttccgagtcgccctacccattccacgagaattcagcactagggccgcacggatctcaggagtagacaagacaacaggcaaggtgagcaggccgatcggccacttacctccttgtcgaggagcttggtgaagaagcgctcggcctggagcgcggagacatcaccacgatagtcgcgccagacgaggacgcggcccttaatgtccagcaggaagagcgccgacacggcgcccgccatggtggtagggggcgatctcgtcctcgccgcccaccggatctggatctgcacgcccccgcctgcgcctccctatctgcggccagcggcggccatgcgggtgcgggggcgcgagggaggagtgttctcggatctcgcctgccgcaacgtcgcccgacgtgctcgcgcggcgcggcgctggtttgtatcggacttggaaacgcaagaatccggaaacggaagtggagaagggagagagggctggatccgggtgcct

SEQ ID NO: 269 - DNA, 4492 bp, Zea mays
  source 1..4492: mol_type = genomic DNA
aggtcccaccgttcagtggacgtaagaaagacacccggatcctgcgctctccttaccctctccacttccgtttccggatcccgtttccagctccgatccaacccagcatctgtaccgcgccgcgcgagcacgtccggcgccggtgcggcaggcgaaatccgagagcactcctcccccgctacgccgcaccgcccatggccgcagctagccgcagatagagagaggcgcaggcgagggcgtgcagatccagatccggtgggcgggaaggacttgatcgcccccaccaccatggccggcgcggtgtcggcgctcttcctgctggacatgaagggccgcgttctcgtctggcgcgactaccgcggcgatgtctccgcgctccaggccgagcgcttcttcaccaagctcctcgacaaggaggtaagtggccaatcagtcctcgcgcctcgcctgctctctagtcctgagatctgtgcggccctggtgctgagttctcgtgcaatgggtagggcgattcggaagtgcactcgcctgtggtctacgacgacgctggcgtcacttacatgttcatccagcacaacaatgtcttcctcctcaccgccgctcgccagaactgtaacgcggccagcatcctcctcttcctccaccgtgtaatagatgtacgtgccctcgccccctgtttgcagagaatcgttgatggcattgtattgcctggtgttcatgcgacttgtgcgtgagtacaggtgtttaagcactacttcgaggagctggaggaagagtcgctcagagataacttcgtcgttgtggtaagcaaattttcaagtacttcttctgtttgatgtacgactgttgggatttgagagaatggggctcatttcgtgtggacagtatgagttgctcgatgagatgatggattttgggtacccacaatacacggaggcgaagatattgagtgagttcatcaagacagatgcatacaggatggaggtcacacagcgtccacccatggccgtgacaaatgctgtgtcatggaggagcgaggggatccggtacaagaagaatgaagtatgttgatttactatttactaagacctctatttttaatgcaggcaatcagctctgtgatggtacttgacaaaccaccacactttgtatgtgcaggtcttcttggatgtagtggagagtgttaacattctagttaacagcaatggccagattgtgagatcagatgtggttggggcactgaagatgcgaacatatttgaggtgggtttgcattgtcaatattatgacatcatcttcctaaacattattaaagattaaaagcatcttatcatgtgatcacacaactaagcagttgtggtctataattaagcgcttatagaatactgttatttaaacaagcgatcaattgtttgttgatataaaatatttatagaaaacagctttgaagggcgggcctggtgcagcggtagagcctaccgtctgtaaccggaaggtcccgagttcgagccccagcctctgtatattatgcgggtaagtcttggcgcttaaagatacccttccttagaccccacacagtgcgggaagcctacggcagtgggttcgccctttatagaaaacagcttgcattgctatgggtgaatttgttcccaagatctactgattttatgctggattgggatagcacacctaggcttttattaccatgacctctctttgttgtgatgtagattagtgatcaaatggtatgaaaatttttaaattgaaactcgaggatattacttgtccagtgttgctagttctgattccagttttttctcttgctaggttatatgctcaaatctttgttcagggtatttattttgtaattctatttcacttctgctggttattgtgtgttcctttttgatggaacctgtcaacttgctgtaacttctatcatacatggcttaattgcttcatttttgtttcttttggaagcttgtatataccatctttattttccttacaagatattgataaatttataatgcttatggggtataagcgtataaccatataagtcttgaaataagtcacatattacacaatgaataccctaggatttcgagttatgcatattgtagggatggaattttattaatgctataactattttggataatgtttcatgagctagcaattgcttttgtgaacttcaaagtttatttacgcagaaaatgtctgtctttcactgttatcttctatatatatatatatatatatatatatatatatatatatatatatatatatatatatatatatatatatatatatatatatatatatatatatatatatatatatatatatatatatatatatagtgtttagtagctataaattgtattctcttctataaaattcgttttgataactgggaacactgtatattcgtaaagaaagttaacaaaggtcgtactctcaatcagcaatcattatctaacggtgagtatactaaaggaagtttactagttgtgaggtaaataattatttgtcttctgtcctaaaactatttatgatttttgatatccagtattcagatagatgtttacttgtcgaaccatgaaatgaataaacttgaaatttgccaaccacagcttgtgcttgtaaagtttgtaccgcacctaaggcatatttgtgtgccatttggttaatagatgtcggttgtctttctgttttaatatgttgagaattgctggactggagactcatggcctactttataataacaagatgtacggaatgattttcatttgatacattcttctttcttcatgatattaaatgagaacttgccaactagggtttttgaactactcattttatgcagtcacacttgatattcttcttgcattcagatatacacatatgtagccctaacagtgagacattttgaaacagtggaatgccggagtgcaaacttggcttgaatgatagggttcttttggaggctcaaggcagagcaactaaaggcaaagcgatagacctcgatgatatcaaatttcatcagtaagcaaaatactgctctttttggcactaaatctgttgcatcactaattcagtgtgaccattctcccttctttttaggtgtgtacgtttggctagatttgagaatgatagaactatatcgttcatacctcctgatggatcttttgatctaatgacatacaggcttagcactcaggttctcttcctgatcaactgtggaatgctttatagaagatatggaatgttttcacttcattgttttcacatgcctgtctttatttgatgtccttaaggtaaaacctcttatctgggtcgaagcacagattgagaaacattctagaagccgtatagaactcatggtgaaggcaaggagtcagtttaaagaaagaaggtgagctgtttacaaaagcaagatttgcttgtgtaacaggactgggcttttttaaagaacaggtttcgtttttttttccatttacagcacagcaacgaatgttgaaattgaagtgcctgttccttcagatgccacaaacccaaatataagaacttcaatggggtctgctgcatatgctcctgagagagatgcaatggtttggaaaataaaatcattccctggtggcaaggtaattactatccaattctaaattaattctttgttttctgttcgttgctattttgaggtgcactaaactgctaatgtgatgaagcaacctatcctataggaatacatgtgcagagcagaatttagtcttcctagcataacagcggaagaaggggccccagaaaagaaggcgccgatacgggtgaaatttgagataccatatttcaccgtatcaggtattcaggtaatatgtttgctgtttgccgatacttgtcaatggttctagcattctatctactgtatcttatttggagtcttcagcctctgaatgctttgctatattgtctatcgttcaggtccgttatctgaagataattgaaaagagtggttatcaggcactcccctgggttagatatatcacaatggctggtgaatatgagctgagacttatatgagttctctcttctctggctgccggacgacttttgaagctgcaggacactaaagatacatatttgctatcgacacagcgaacagttttcatttggatgttggcctggaagtcttctgccgaccatacccctccccgtggtggggcttgctgttcatcttgttaggctcaccttaccctggttattgtaagttaccaatcaagtacagttttggaggaaaggatattcagttttcagttcacttgtattgttattgatttattttgtgggtaccaaactagatttgtttcgttctgtattacacggaaaacatgggctgatttgagttcaacaaaacattgccacatctggcgatgattctggggtgcgggttgaaacaaatttgcccttttttttactgtaaatgtcgt

SEQ ID NO: 270 - DNA, 7736 bp, Beta vulgaris
  source 1..7736: mol_type = genomic DNA
atgtcgggagcggcctctgcgctgttccttctagacattaaaggtagagttctcatatggcgggattatcgcggcgatgtttcagcggttcaagctgagagattcttcactaagttcattgagaaagaggtttttgctgatctatctttttcaattctgtcttagattgaagtttaattttgatttttagcagtattttctggttgatctgatcatattgaggctttttgcaatcttgaatgattaattcggatgtgtcgttttatatttatgcataatttggttgtgtgatgagcttattttgttaggaaaacttgattctccttgttgtatttgatatagatcccagtttggataggtgtactttgatttgggttacagtgatttatgcttgaaggaaagtgagatgtctgatcgaattaggaaatgagacgcatgaggttctatgatcttttgaagatttagcattttgctcacattgtttgattggtggcacacattgttgtttatctttacatgtgatcgtaagtcaattaatttgaattgagtttgaagaactcgaatgattttctgtcgtttgggagggttctgttgtttaatctaattgtgaattttttaaatatctgagtattttggggacaatgtataatgatctatgttatttggagctcggacaagggatttggttgggttgtttgtaagttccagcatgactatttacttggagttgatcattattgtgattatagaattgtttgaagtgtcaaagtgtgttaacatactaaagtttgtcggagataaaagttaacaccaagtggtatagagaaataaatatgatatcttcggaggtggactaaaacgcaacatattgggatttgtggttattttggtttcccctgacttattgaggggttattggggatttatctgactaataggttgcatctgtgacgatttttgatgcctagaactgaactcttttgtagagtctctaagtgtagccaacagatttttctgtaagtgtcgatgtgccacagcagttgatacttcatagttaaagattgtttgctcaagtttttcttttgtttttactataaactgcctatttttttatgcctggtagatggatctcactattcatttttccaattgatgtatttttcagggggatccacagtcacaagatccagtcgtgcacgataatggtattacatacatgttcatacaacacaacaatgtgtatctacttattgctgctagacaaaactgcaatgctgctagtcttcttctctttctccaccgtttagttgatgtaagctccatcagtgatcattgtacattgctctatgtttggtgcattagtatcttctgtttctgtatgttggtcttcctttgtagaaggtctgcatttcttagtagatcctttatatgggaggaacttccttgtgcaggttttcaaacattactttgaagaactagaagaggaatctcttagagataactttgttgtagtggtaagaggtattttctctctacttaaacaatactggtatagtcgagattgatatggctgatacaatttgttatctgcagtatgagttacttgacgagattatggatttcggttaccctcagttcactgaagcaaagatccttagtgagtttattaaaactgatgcttatcggatggaagtcacacaaaggcctcccatggctgtaacgaatgcagtttcatggcgtagtgaaggaatagcttacaagaagaatgaagtaattttgaattcctaggatctcatttttcttgaaagcattgtaacctgcaaatattgaattgcttcttcctttcgttacaggtattcttggatgttgttgagagtgttaatatacttgtaaacagcaatgggcaaataattagatcagatgttgttggggcattgaagatgagaacgtatttaaggtgcattaaatgacattatgatctgccttatttcctttcagcatagttaaagaatcagctcaaatttttgtttccataagaaactttgagcatttaagtgtaagcatattgcccttagaacatttacacaacagttatgctttagtaatgtattgctattcaatccatctttgttggctatatttatatttttggatcagaggggtggggttgttaatatattatcttactgtttgcatgatatttctgtatcctgagtctgatagaattagaataaggttgaaaggtcagatattgctatatatgtgttataccctgaattttgttacaatatgtctgcgggaattttgtactgactgttatattttttttattgatccttgtagtcacatcttctaagtttaatattagcttgagcatccttaaaggggcgtttggtttgaaaatttcaggtatttatttgaaatagctaaaacccataccccaccctatgaaccaaagcctctctgaagtatggtttctagaacagagaaatggatgggagagagaaaatctatgacaaagactgctgattaataacttctatatcttgtaggagtttgactgttttgtggctaagtccgaaactgattctttgtcttttcctggggggtggagggtttgcaatgtttgtttagttagtgtgacatcaatcaacaagagggacttttggtacatcgcttagttcttctgtgatgaacttctatcactttattttgatggatgcatttagtctctgcactgcttgtctactttcctatgaattagggaagctctttaatattcctaagattaagggtttctttttatatttatccagcttctgttatgtaacaaatctaggaagtcagcccttggtgtaaaatgtctatctttgttcaacaacttgttaatgacaaattcccttgtacaaacttgacccttagctgttagatgttacatactaattatccaatattatctgtcgcagtgggatgcctgaatgtaaactaggcctgaatgacagagttttactggaggctcaagggcgaactactaaggggaaggctatcgacctggacgatattaaatttcatcagtatgtccatgactaagttgtgataactacttttgctactagtggtttatgttaataatttgctagtgggaaatgtgtttcgtaagttctttattgagcttgctatcgtctttgctataggtgtgtgcgtctggctcgttttgaaaatgataggaccatatcatttatacctcctgatggatcctttgatctcatgacatatagactcagtactcaggttcacttctatgtttttctgcactccctctactgctttgcctcttttctaagacaggacatatcctttctccatttataatgttctggatgtcgttttgcttcaggtgaagcctttagtttgggttgaagcacagattgagagacactcaagaagtcgtattgaaataatggtgaaagcaagaagccagtttaaggagcgaaggtatagctatagttatgttttctacaggtcaatcatgtattgtgacttttttttttcttctaaatggtatacttccttgctctttttctattgcaacatatgagatttcatgcttcccaatgcacaagtttaaccattaatatctctagttatgtttcgttaaaattatagaaagttgatattttggatgtatatatcgagtcgaaactaacaagaatgcatatgattatgtttttccttatgtaaaaatcatcatagatgaacggaggagttatttatctgtgtaaactgtatgctatcttaattttgtgtctgtatggtccaattctatagcactgcaacaaatgttgagattgaacttccagtgccagctgatgccaccaatccaaatattcgcacatcaatggggtctgcttcttatgcccctgagaaggatgctttagtttggaagataaaatctttccctggtggcaaggtaaattttattttgattttttaagctgcctttattattttttacgtctaatctcatgttgttttgcaaatatatactccctccatttctcatagttcatctcactttccatgttcatcttttcttcataattcctccttttaatttatgtaaacttttattttcctcttttaccctttcttgccgtaccacattggttctcttggttctttaattattcatgtctccaaaaaactttctttctcttatccagaagttgaataagaccaattttcacattcccctacattcttcttgctttctggtgctataataagtagcagaactttgaggaatagagggagtattttttttttttctgcaatatgtccttgaatttttagtaatgaacaaatctcaggaatacatgttgagggcagagttcagtcttcctagcatcaccagtgatgaggcaactcctgaaagaaaagctcctatacgtgtaaaatttgaaatcccgtatttcacagtttcaggaatccaggtatcaaatgttatgatgatttggaaaaagcatgcaatgtttcttatacttgtatcatggtctggcatcctgttttgtttgcttgtgactccttgtatacttgggcaaagaaggatctatagatcgccataataatagattacacagttttctggtctatatttgcacatctaacttgttgccgggcttgtgacttcttaaatatctaggcgaaggaggagatattgattttcatcacactagtttatacaattactagctttctaatctgtgaatggacacgctaaaatatacttccgtctgttctttgatatatatctagtattaattaccaattgtaaatggcacaaagtttaggattagctaatagaaaaaaatatctaattgtattaaacccatcacccatgtgatgcattaaaaagtaagaaatggtagaagtataaggtaagagaggattggtagaagtattgacaaaagtaacacatagaaggtggattagtgaggcctcaatatacctaaagagaaatcatagaagtatttataaatagcctaaaaaagatatatggtagaagtattaaagactagtgggagtaataaattgtcctccctttgttttgcaatagttaaaaggtagtacgctactactttaaggctataaaaggtatccaatacttataattgtaatcatattctaaaattatataaaattttagcatcatctcataaaaatcttaattctatagaaaaagttaatcctaattgtattccaaaatagtgaaaattttacctatattaaattcttgatttttcaaaaatttttgacaaaattatattggataaataattttgtacttctaatattttcaagaacataaaaattttttttacgattgtcaacacacaactttaatatatttaattatgagtaagtgataatcataagaagctgatatttcgaaaatataagttaaaccaaatctaacaagattcacgtgatttttatttttccttatgataaaacattaatgatggtcaaagtgaagtatgtgaatagtgtcaaagtacaaagtgtgtagattaaaaagaaatggagggagtacttttcaaactgattgtaataaagcaaccatcaatttactcaacttatcatataagtttattgtatgttatatcctaaagtctatatatatatatatatatatatatatatatatatatatatatatatatatatatatatatatatattatcccaaactcaaatattttaaaatcatttgattatgacatggctcacttagttggcgcactttgtatgctcatgaaagtcccgctaatagatagatataaagattatatatatttctttttatcttgatcgtggatgttcttctatgtttaatctatcagattataaatatttaagatgtagctcaatgtgattattgtgatatcattactagtgcaagtcattgccatcattctttcatgcctcccttgtagttggactagtgaaagtaactgttgctacattgtcttcatgaggattgctgtgtctattattaaccatcctttcacacgacttgcctagttgccttaaatatattatgttagtaaattttgattatgtggaatctggaaaagttcaattttatttctgtcatcttcttcggcgtgaatcatattcagtaaggttctttgtagtgtcatttgtctggaaccaaacttgaaaatgcaaatttgtttcttttggttattttaattttatttttttcttcatttgacttttgacctcataaaatatatttgatttgcaacatggtcagaatattagaaaactttttggattttgataatttagcttgagttgaaagcattattctagatggccgtaggtctgatagattcttgacattgcagaaactctatttatgtttggtggtgagagttgataatgatatgatgataatatgatatgctaggaatttggaaaaaacaagtggagcagtggttttgtaaagagaaataaatgaatgtatatggactatggattgaggattaggactatcctatttgtttctgttgaatctgaaggagagactttataaagggtagttagagaacaggatgaaagttatacgtccattaatacaaggggagagtgcacgctacaatgttttttgaggggctcactcataaagaaagacatgaggctttacggcctgtttggttagtgggcataaattgtggtagatttattgtaaatttgtaaagaaactctaatatcaatacccatggtaatgaaatttcccacaaagcatgagtttttctttatacatttccattaagacccaaaaccacattcccaagtggtaatggatgttaatgaaattttaggaagaaaatagatgtttgggatgtgataacattaccatgggtaatgctatgagatttcctatacaaagttatactactatgaattaccattatcacgatttataatcactaaccaaacgagccgttagtacttagtatactgattctccaatgtgtccatatctcatatgagatatagatttgagggatcgtgtaaaataaaaagtaattgaacaattttttgagaattcaagtaaattgagaagcaaaagtcaaagagatttggtctaaaaccttgtaaatggacttttttttttttagatggagggactaatatcattagggctgttcataatgatctgatccaattaatccgatccgcaatccgaattttggatcgcatcggataatcgaaatgaatagccatacataatatgtgaatccctaattccataaattcttcatatgtaagatttggccattatctttatatcccattaacatggcaccatttattattttttaaaattgccttaccttgaattttaggtgattaaccttagccttaaaattgattattgcctttttctactcatttggtctaagttctgctctcttctgcttagttattgctgttctactgtcatgtcttttactggttctcatccctgtttggtgtgtgcctctgttttgtttcttgctctgattaatgtcttttgaacttaaggcagtcatgatgatcataaactttgaatttttgatctgcaggttcgttatcttaagatcattgaaaagagtggataccaggctctgccatgggtgaggtacataacaatggctggcgagtatgagctgaggctaatgtaa

SEQ ID NO: 271 - DNA, 1287 bp, Pisum sativum
  source 1..1287: mol_type = genomic DNA
atgtcaggtgcagcctctgctctcttccttctcgacatcaaaggccgcgttctcatttggcgcgattaccgtggtgatgtcaccgccgttgaagccgaacgcttcttcaccaagctcatcgagaaagagggtgatccacagtctcaagatccagttgtatatgataatggtgtgagctatatgtttgtacagcatagcaatgtttacctcatgacagcaacaagacaaaactgcaatgccgcaagccttattttcttccttcatcgcatagttgatgtgttcaagcattattttgaggaattggaagaggaatctcttagggataactttgtcgttgtgtatgaactacttgatgaaataatggactttggttacccccaatatactgaggcgaaaattcttagtgaatttattaagacagatgcttatagaatggaagttacacagagacctcccatggctgtaacaaatgctgtatcgtggcgcagtgaagggataaactacaagaaaaatgaggttttcttggatgtggtggagagtgttaacatacttgtcaatagcaatgggcaaataattagatctgatgttgttggtgcactgaagatgagaacatatttgagtggtatgccagagtgtaaacttggcttaaatgatagagtgttattagaggcacaaggtagagcgactaagggaaaagcgattgacttggaggacatcaagtttcatcagtgtgtgcgattagcccgatttgagaatgatcgaacaatatcctttatcccacccgatggatcatttgatttgatgacatataggctcagcacacaggttaagcctttattttgggtggaagcacaagttgaaaagcattcaaaaagtcggattgagattacggtaaaagctaggagtcagtttaaggaacgtagcactgctacaaatgttgagattgaattacctgtgcctgctgatgcaaccactccaaatgtgcggacatcaatgggatctgcagcatatgcacctgagaaagatgcattaatttggaaaataagatcttttcctggaggcaaggagtacatgttaagggcagagtttcgtcttcccagcataacagacgaggaagcaactccagagagaaaagctcctatacgtgtaaagtttgagataccttattttactgtgtcaggaatacaggttagatatttgaagattattgagaaaagtgggtatcaggctcttccatgggtgagatacataacaacgggtggagagtatgaactaaggcttatttga

SEQ ID NO: 272 - DNA, 1287 bp, Pisum sativum
  source 1..1287: mol_type = genomic DNA
atgtcaggggcagcttctgctctgttcctcctcgacatcaaaggccgcatcctcgtctggcgtgactaccgcggcgacgtctccgccattgaagctgagcgcttcttcaccaaattcatcgacaagcaggctgatgaacagtgtcaagatccggttgtttacgataacggtgttacgtatatgttcatacaacatagcaatgtttaccttgcgattgcggcgagacaaaactgtaatgccgctagtcttattttcttcctgcatcgactagttgatgtgtttaagcattattttgaggaattagaagaagaatcgctaagggataactttgttgttgtgtatgagctacttgatgaaattatggactttggttaccctcaatataccgaggcaaagattcttagtgagtttattaagactgatgcttatagaatggaagttactcagagacctcctatggctgtgactaatgcagtgtcctggcgaagtgaagggattagttacaagaaaaacgaggttttcttggatgtggtggagagtgttaatatactcgtcaatagcaacggacaattaattagatctgacgttgttggggcactgaagatgagaacatttttgagtggtatgcctgagtgtaaacttggtttaaacgatagagtgttgttagaggcacaaggtagaacaaccaagggaaaggcgatagacttggaagacatcaagtttcatcagtgtgttcggttggctcgatttgaaaatgatcgaacaatttctttcatacctcctgatgggtcatttgatttgatgacatacagactcagtacacaggttaagcctttactttgggtggaagcaactgttgaaaagcattcaaagagtcggattgagattatggtaaaggctaggagtcagtttaaggaacgtagcactgccacaaatgttgagattgagttgcccgtgcctgttgatgcaaccaatcctaacattcgaacgtcaatgggatctgcatcatatgcacctgaaaaagatgcgttgatctggaaaattagatccttccctggaggcaaggagtatatgttaagagcggaatttcgccttcccagtataacagatgaggaagcaactcctgagagaaaagctcctatacgtgtgaaatttgagataccatattttactgtttctggaatacaggttagatatttgaagattattgagaagagtgggtatcaggctcttccatgggtgcgatacataacaatggcaggagagtatgaactaaggcttatttaa

SEQ ID NO: 273 - DNA, 1287 bp, Glycine max; identical to SEQ ID NO: 49
  source 1..1287: mol_type = genomic DNA

SEQ ID NO: 274 - DNA, 1287 bp, Glycine max; identical to SEQ ID NO: 50
  source 1..1287: mol_type = genomic DNA

SEQ ID NO: 275 - DNA, 1287 bp, Glycine max
  source 1..1287: mol_type = genomic DNA
atggcaggggcagcctctgctctgttcctcctcgacatcaaaggccgcgtcctcatctggcgcgactaccgcggcgatgtctccgccctcgacgccgaacgcttcttcaccaaactcatcgaaaaacaggccgatccgcaagctcaagatccggttgtgcacgacaacggcgtgacctacatgttcatccaacacagcaacgtgtacctcatgatagccaccagacagaactgcaatgccgccagcctcctcttcttcctgcaccgaatcgtcgatgtgttcaagcactactttgaagaattggaagaggaatcgctcagggacaacttcgtcgtcgtgtatgagctacttgatgagattatggactttggctaccctcagtacactgaggcgcagattcttagtgagtttattaagaccgatgcttatagaatggaagttacgcagagacctcctatggctgtgactaatgctgtgtcgtggcgcagcgaagggataaactataagaaaaatgaggttttcttggatgtggtggagagtgttaatatacttgtcaatagcaatggacaaataattagatctgacgtcgttggggcgttgaagatgagaacgtatttgagtggtatgcctgagtgcaaacttggcttaaatgatagagtattgttagaggcacaaggtagaacaaccaagggaaaggctattgacttggaagacataaaatttcatcagtgcgtgcgtttggctcgatttgaaaacgatcgaacaatttcctttataccacctgatgggtcatttgatttgatgacatataggctcagtacacaggttaagcctttaatttgggtggaagcaagtgttgaaaagcattcaaagagtcggattgagattatggtaaaagctaggagtcaatttaaggaacgtagcactgccacaaacgttgagattgagttgcctgtgcctgttgatgcaaccaatcctaatgttcgaacttcaatgggatctgcatcatatgcacctgaaaaagatgcattaatctggaaaattagatccttccctggaggcaaggagtatatgttaagagcagagtttcgtcttcccagtataacggatgaggaagcaactcctgagagaaaagctcctatacgtgtaaaatttgaaataccatattttactgtatctggaatacaggtaagatatttgaaggttattgagaaaagtgggtatcaggctcttccatgggtgagatacataacgatggccggagagtatgaattaaggcttatttaa

SEQ ID NO: 276 - DNA, 1287 bp, Glycine max
  source 1..1287: mol_type = genomic DNA
atggcaggggcagcctctgctctgttcctcctcgacatcaaaggccgcgtcctcatctggcgcgactaccgcggcgacgtctccgccctcgacgccgaacgcttcttcaccaaactcatcgaaaaacaggccgatccgcaagctcaagatccggttgtgcacgacaacggcgtgacctacatgttcatccagcacagcaacgtctacctcatgatagccaccagacataactgcaatgccgccagcctcctctttttcctgcaccgcatcgtcgatgtgtttaagcactactttgaagaattggaagaggaatcgcttcgggacaatttcgtcgtcgtgtatgagctacttgatgagattatggactttggctaccctcagtacaccgaggcgcagattcttagtgagtttattaagactgatgcttatagaatggaagttacgcagagacctcccatggctgtgactaatgccgtgtcgtggcgcagcgaagggataaactataagaaaaatgaggttttcttggatgtggtggagagtgttaatatacttgtcaatagcaatggacaaataattagatctgacgtcgttggggctttgaagatgagaacgtatttgagtggtatgcctgagtgcaaacttggtttaaatgatagagtattgttagaggcgcaaggtagaacaaccaagggaaaggctattgacttggaagacataaaatttcatcagtgtgtgcgtttggctcgatttgaaaacgatcgaacaatttcctttataccacctgatggatcgtttgatttgatgacatacaggctcagtacacaggttaagcctttaatttgggtggaagcaaatgttgaaaagcattcaaagagtcggattgagattatggtaaaagctaggagtcaatttaaggaacgtagcactgccacaaacgttgagattgagttgcctgtgcctgttgatgcaaccaatcctaatgttcgaacttcaatgggatctgcatcatatgcacccgaaaaagatgcgttaatctggaaaattagatccttccccggaggcaaggagtatatgttaagagcagagtttcatcttcccagtataacagatgaggaagcaactcctgagagaaaagctcctatacgtgtgaaatttgaaataccatattttactgtttctggaatacaggtaagatatttgaagattattgagaaaagtgggtatcaggctcttccatgggtgagatacataacgatggctggagagtatgaattgaggcttatttaa

SEQ ID NO: 277 - DNA, 4051 bp, Vicia faba
  source 1..4051: mol_type = genomic DNA
tagataagatacaggctttaaaagaatattatagcataaatcgatccaagtaactgatgccacaactatgcttttctgccattgatgcgttaaactttgcaaatccacaattaaacatttaatccttcacaattgggttgtatcacaatcaactatctccctataattggtctccttccaaatacaaaaccagtagttctcttaaaaatgtaaaccaaattacaattcgacataatgatggacgttctgattacaaaaagaaaggggtctaaaatatataaatcaacacacaattgaccaacgggaatcgtaacagtttcggccaacactcaattcatattaacattcaagacatcaattctgttgtggttggccaaatatattctaaataacttcgcttaaaactccctccgctgtccaccagcttcagtcgttgttcattgaatgatacagttatttggtgaaattcaaacaccaatcgagggtacaaatctcaaataagccttagttcatactctccacccgttgttatgtatctcacccatggaagagcctgatacccacttttctcaataatcttcaaatatcttacctgtattcctgacacagtaaaatatggtatctcaaactttacacgtataggagcttttctttctggagctgcttcctcgtctgttatgctgggaagacgaaactctgcccttaacatgtactccttgcctccaggaaaagatcttattttccaaattaatgcatctttctctggtgcatatgctgcagatcccattgatgtccgcacatttggagtggtggcatcagcaggcacaggtaactcaatctcaacatttgtagcagtgctacgttccttaaattgactcctagcttttaccgtaatctcaatccgacttttagaatgcttttcaacttgtgcttccacccaaaataaaggcttaacctgtgtgctgagcctatatgtcatcaaatcaaatgatccatcgggcgggataaaggatattgttcgatcattctcaaatcgggctaatcgcacacactgatgaaacttgatgtcctccaagtcaatcgcttttcccttagtcgctctaccttgtgcctctaataacactctatcatttaagccaagtttacactctggcataccactgtattacacaacaaggcatggatgaaatatttaagttttcaaataaatacacaatcacagaagttgcttagaatcaaatatacttcaaaacaaaacaaaagctatgtgttccaaaccaatatcaacagcaaaacaagggagtaatatgagtcaagtagtagaacatatctccaatatatctaatgatgcaatgtttagtcccagctacttaagagaaacatacttcaattgctactttcattagatagaaggaaaagaatgtaaataaatccatagtggtgtattacaggaggaaacataagaataaggcttaagtgttagttagtagcctcagttagttagttcctaagtgttagttagtctctaagtgtgtgttagttttattcggtttcttattcgattagcaatctgttatgtttgttgcttagttgttttttctgttaggatagagctctaagatcctttacctatccctatgtaaaggaagtctataaataaggttttccttcccctttgataacccaatcactgggttcaaatcatacaagcacagcttctagaaggttgtagaagctgcggaaataatagttagttgggatattccctggattttagggaattttttgttgttaaagagagggaaaaggtagtgtgtaaggcattcagagaagtagttgccattctgttaggagaatattctttggtctaggaacttcatgttatggttaggacttaggagtttaacaactctggtttacccttttcaatttccgttttctaccattgtagagctcttgaactcatcttttccgatcaatgatatacggttttgttatctttattgttcgggttctatcattctctctcttttcttattataactcttgactggtgagtttttatcaactgctaaagggtcttcttttgtcttctgtgtcattattttctcctcctataaccattttttctacaataagtgtatattcttaatatgatttataatcatgtttttttgacagaatttgtatagtcatgttatatcatcaagcttaattcttgagttggggaaccaatacatatttttattttgttgtgtttgaacaatttagttgtttcatgttatattataattataagaaaatactttacttttatattttatattgacacaccagtgtcttagctttttaaaaaatgttctatctcgtactactcatacccaatacaagtaccatacccgtacctatgcatcccagccaaaacccaatgtcataccaccttgcatttcattagaagaaaattgagatacagagctagagcactaaaacttcaaggattgcagatttcccaattgcccaaaggccctaaatctatccaagatgcctcccttcctgtaaggtcttcctcgtatatctttgcacatcgcagcctaacctttatttttttatcatacctacatttttacaaaacatatccaacaccgcaagtcatgcaaacctgcattttattaggagacatagggaaaattcccttgaatacatacagaactagaacacttaaattgaggttcttcaaacatcacactttcccaaaggccttaactctatccattgacatgatgcttcctgcaaatcccttcttcttatttctaggcacatcagagccaagccttaacctttgaagcatgggcaccgctggttttaagcatgtcctgtgtctgacatgttttgaacaacgacacatatgacatgtatcagacacttcacttaggtgtacaaaagaaaattaagttttttcactccaaatggctccgacacttaccggacacccttaggctcagaagggacacctaaatggtttttgacaaatctccctaacaaaaaacctatgtaagccttattactaaacccaaataactagtaacacatctcaagaggttgaaattcagtagttcacagggatgcacaaagcaaacctcaaatatgttctcatcttcaatgcaccaacaacatcagatctaattatttgtccattgctattgacaagtatgttaacactctccaccacatccaagaaaacctcatttttcttgtagcttatcccttcacttcgccacgacacagcatttgttacagccatgggaggtctttgattaacttccattctataagcatctgtcttaataaattcactaagaattttcgcctcagtatattgcgggtaaccaaagtccattatttcatcaagtagttcatacacaaccacaaagttatccctaagagattcctcttccaattcctcaaaataatgcttgaacacatcaactatgcgatgaaggaagaaaatgaggcttgcggcattgcagttttgtctagttgcagtcataaggtaaacattgctatgctgtacaaacatatagctcacaccattatcatatacaactggatcttgagactgtggatcaccctctttctcgatgagcttggtgaagaagcgttcggcttcaacggcggtgacatcgccgcggtaatcgcgccaaatgagaacgcggcctttgatgtcgagaaggaagagagcagaggcggcacctgacattggagagtgattccgagcctggatcgggtcggattggatcggaaatggatcgggattggatcagtgttgagaagaagttgaggaaaattagggttcaggcaaccgttgaaaatgaatcatgttgatgattcagtttctggttttgaagttttcagattggagcttcgtgtttttttttttttttggttatgattcttcttctgcgctgggttgaaagttggaagtgagagtgcaatctctgatcgaacgatgccgtttctggtacttagaaatgaaaatagaacaggaaaagca

SEQ ID NO: 278 - DNA, 1287 bp, Helianthus annuus; identical to SEQ ID NO: 51
  source 1..1287: mol_type = genomic DNA

SEQ ID NO: 279 - DNA, 1296 bp, Helianthus annuus
  source 1..1296: mol_type = genomic DNA
atgtcgatggcaggggcggcctctgcgctgttccttcttgacatcaaaggccgtgttctggtgtggcgcgactaccgtggagacgtttctgctcttcaggccgaacgtttcttcaccaagcacattgaaaaagagggtgatgatgctggttctcaaggtccagttgtgtatgacaagggtgtcacttatatgttcattcaacacaacaacttatatctaatgacggcttccaggcagaactgtaatgctgcgagtcttcttctgtttctacaccgcctcgttgatgtatttaagcattactttgaagaattagaagaggaatcacttagagataactttgttgtagtgtatgaattgcttgatgaaatgatggactttggttaccctcagttcaccgaagctacaattcttagcgagtttatcaagaccgatgcatataggatggaagtttcacaaaggccccccatggctgtcacaaatgctgtgtcttggcgtagtgaaggaatacattacaaaaagaatgaagtgtttttggatgttgtggagaatgtgaatatacttgtcaacagtaacggacagatagtaagatcagaagttattggagcattgaagatgcgaacgtatttgagtggtatgcctgagtgtaagcttgggctaaacgatagagttttattagaggcacaaggcaggactactaaaggaaaagctattgacttggatgacatcaagttccatcaatgtgtgcggttggctcgttttgaaaatgatagaacaatatcatttgtacctcctgatggagcctttgacctcatgacgtatcgactcagtactcaggtaaagcctctaatatgggtggaagctcaagtagaaagacattctaaaagccgtgtggaaattatggtaaaagctcggagccaattcaaggagcgtagcactgcaacaaatgttgaaattgaattgcctgttccagctgatgctattaacccgaatattcggacctccatgggatcagctgcttatgcaccagaaaacgatgccctttgctggaaaataaaatcttttccgggtggcaaggaatacatgttgagagcagagtttaatcttcccagtataacagccgaagaagcacttcccgagagaaaagctcctattcgtgttaaattcgaaataccatattttacaatttcaggaatacaggttcggtacctgaaaatcatcgaaaaaagtggttaccaggctcttccatgggttcggtatataacgatggccggagaatatgaacttagacttgtgtga

SEQ ID NO: 280 - DNA, 1287 bp, Helianthus annuus
  source 1..1287: mol_type = genomic DNA
atggctggagccgtttcagcgcttttcattctcgatatcaagggccgctgtttgatcagtcgtcactatcgtggtgatattttatccgttgaagccgagagattcttcacaaaacttcttgagaatgaggaagatattgaggctcaaggtccagtagtatttgataacggcgtgtctcacatattcattcgacacaacaatgtatacttaatggctgtatccaggcaaaactgtaacgttgctagcctcattgcatttctccacaagttagccgatgttttcgagtattatttcgaagagttggttgaagaatctcttagagataactttgttgtagtgtatgaattactcgacgaaatgatggactttggttacccacaatataccgaagcaacgattttaagcgagtttatcaagactgacgcttataggttggaagttacacaaaggcctccaatggctgtaaccaatgcggtctcgtggcgaaatgaaggaatatattacaaaaagaatgaagtattcctggatgtgattgaaagtgttaacatactagtcaatagtaaccgacagttgattcggtcagaagttggcggggcgttaaagatgagaacgtgtttaagtggaatgcctgagtgcaagcttgggcttaacgatagagttctaatggatgcacaagatcggtcttcaaaggggaaatgcattgatttagaagacatcagatttcaccaatgtgtacgtctagcgcgctatgaaaaggaccgcacaatatcttttattcctcctgatggatcatttgatctaatgacatataggattagcactcaggtgaaaccgttaatttgggttgaggctcaaatcgaaaaacatgcgagaagtaggattgagatgcttgtaaaagctagaagccaatttagagagcgaagtaacgcaacaaatgtccaaattagcatacccgtgccatccgatgctacaaaaccaattgttcgaacaacaatgggagccgcttcatatgctcctgaacacgattcgcttatatggagaataaggtcattccccggtgacaaggagtatatgttaggggccgagtttagactcccgagtgtcgcttatgaagatccaaccccaaacaaaaaaactcctatacgtgtgaagtttgagataccgtattttactgtatctggtatacaggttcgtcacctgaaggttatcgaaaaaagtgcttaccagacactaccatgggtgagatacataacaatggctggtgaatatgaaataagactacagtga

SEQ ID NO: 281 - DNA, 1287 bp, Sorghum bicolor
  source 1..1287: mol_type = genomic DNA
atggcgggcgccgtgtcggcgctcttcctgctggacatcaagggccgcgtcctcgtctggcgcgactaccgcggcgatgtctccgcgctccaggccgagcgcttcttcaccaagctcctcgacaaggagggcgactcggaagtgcactcgcctgtggtctacgatgacgctggcgtcacttacatgttcatccagcacaacaatgtcttcctcctcaccgccgctcgccagaactgcaacgccgccagcatcctcctcttcctccaccgtgtcgtagatgtgtttaagcactacttcgaggagctggaggaggagtcgctcagagataacttcgtcgtcgtgtatgagttgcttgatgagatgatggattttgggtacccacaatacacggaggcgaagatcttgagtgagttcatcaagacagatgcatacaggatggaggtcacgcagcgtccacccatggccgtgacaaatgctgtgtcatggagaagcgaggggatccggtacaagaagaatgaagtcttcttggatgtagtggagagtgttaacattctagttaacagcaatgggcagattgtgagatcagatgtggttggtgcactgaagatgcgaacatatttgagtggaatgccggagtgcaaacttggcttgaatgatagggttcttttggaggctcaaggcagagcaactaaaggaaaagcgatagaccttgatgatatcaaatttcatcagtgtgtacgtttggctagattcgagaatgacagaactatatcgttcatacctcctgatggatcttttgatctaatgacatacaggcttagcactcaggtaaaacctcttatctgggtcgaagcacagattgagaaacattctagaagccgtatagaactcatggtgaaggcaaggagtcagttcaaggaaagaagcacagcaacaaatgttgaaattgaagtacctgttccttcagatgccacaaacccaaatataagaacttcaatgggttctgctgcatatgctcctgagagagatgcaatggtctggaaagtaaaatcattccctggtggcaaggaatacatgtgcagagcagaatttagtcttcctagcataacagcggaagaaggggcccctgaaaagaaggcgccgatacgagtgaaatttgagataccatatttcaccgtatcaggtattcaggtccgttatctgaagataattgaaaagagtggttaccaggcactcccctgggttagatatatcacaatggctggcgaatatgagctgagacttata

SEQ ID NO: 282 - DNA, 1287 bp, Brassica napus; identical to SEQ ID NO: 36
  source 1..1287: mol_type = genomic DNA

SEQ ID NO: 283 - DNA, 1287 bp, Brassica napus
  source 1..1287: mol_type = genomic DNA
atggcaggggcggcctccgcgctgtttctgctcgatatcaagggccgcgtcctcgtgtggcgcgattaccgtggcgacgtcaccgccgctcaagccgagcgtttcttcaccaaactcatcgagaaagagggcgattcacagtctaatgatccggtggcttacgataatggtgtgacctacatgtttgtacagcatagtaacatttacctcatgatagcctccaggcagaactgtaacgctgcgagtcttatctccttcttgcatcgcgtcgtcgacgtcttcaagcattactttgaggagttggaggaagaatcactgagggataactttgtggttgtgtatgagttacttgacgagatgatggactttggttaccctcagtatactgaagcaaggatccttagtgagttcatcaagaccgatgcttatagaatggaggttacacagagacctcctatggctgtcactaacgctgtttcttggaggagtgagggcttacagtttaagaaaaacgaagttttcttggacgtaatagagagtgtaaatatccttgtgaacagtaatgggcaaattgtgaggtctgatgtcgttggagcattgaagatgcgaacatatttgagtggaatgccagagtgtaagctaggtctgaatgatagagtactactggaagcgcaggggcgagcaacaaaaggaaaagcaattgatttggaggacatcaagtttcatcagtgtgttcgattggcacgttttgagaacgataggacgatatctttcataccacctgatggggcttttgatttaatgacatatagactcagtacccaggtcaagcctcttatatgggtcgaagctcagatagagaggcattccagaagtcgtgttgagatgctagttaaagctagaagccagttcaaggaaagaagcactgcaacgaatgttgagatcgagttgcctgtaccaactgatgcatccaaccccaccgtaagaacatctctagggtctgccgcatatgctcccgaaaaagatgctctggtttggaaaatcaaatctttccctgggaacaaggagtatatgttgagagcagagttccatcttccaagtgtaaccgcagaggaagcaacgcctgagagaaaagctcctatccgtgtcaaatttgagatcccttacttcactgtttcaggaatacaggttcgatacctgaagatcattgagaagagtgggtaccaagctcttccgtgggtgagatatataaccatggctggtgagtacgaactcagactcatgtaa

SEQ ID NO: 284 - DNA, 1287 bp, Brassica napus
  source 1..1287: mol_type = genomic DNA
atggcaggggcggcctccgcgctgtttctgctcgacatcaaagggcgcgtcctcgtctggcgcgattaccgcggcgacgtcaccgctgctcaagccgagcgtttcttcaccaaactcatcgagaaagagggagattcagagtctaatgatccggttgtttacgataacggagtgacctacatgtttgtacagcatagtaacgtttacctcatgatagcttccaggcagaactgtaacgctgccagtcttctcttcttcctgcatcgcgttatcgatgtcttcaagcactattttgaggagttggaggaagagtcattgagggataactttgtggttgtgtatgagttacttgacgagatgatggactttggttaccctcagtatactgaagcaagaatccttagtgagttcatcaagactgatgcttataggatggaagtcacacagagacctcccatggctgtcactaatgctgtttcgtggaggagtgaggggttacagttcaagaaaaacgaagttttcttggacgtggtagagagtgtaaatatccttgtgaacagtaatgggcaaattgtgaggtctgatgtcgttggagcactgaagatgcgaacatatttgagtggaatgccagagtgtaagctaggtctgaatgatagagtactgttggaagcacagggacgagcaacaaaaggaaaagctattgatttggaggacatcaaatttcatcagtgtgttcgattggcccgttttgagaacgataggacaatatctttcataccacctgatggggcttttgatttaatgacatatagactcagtacccaggtaaagcctcttatatgggtcgaagctcagatagagaggcattccaggagtcgtgttgagatgctagtaaaagcgagaagccagttcaaggaaagaagcactgcaacgaatgttgagatcgagttgcctgtaccaactgatgcatccaatcccaccgttagaacatctctcgggtctgcagcatatgctcccgaaaaagatgcattggtttggaaaatcaagtctttccctgggaacaaggagtatatgttgagagcagagttccatctcccaagtgtaaccgcagaggaagccacgcctgagcgaaaagctcctatccgtgtcaaattcgagataccatatttcactgtttcaggaatacaggttcggtacttgaaggtcattgagaagagcgggtaccaagctcttccgtgggtgagatatataaccatggctggtgagtacgaactcaggctcatgtaa

SEQ ID NO: 285 - DNA, 1287 bp, Brassica napus
  source 1..1287: mol_type = genomic DNA
atggcaggagctgcttctgcgctgtttctgctcgatattaaaggtcgcgttctcgtctggcgtgactaccgcggcgatgtctccgccgctcaagccgaacgcttcttctctaagctcatcgagaaagagggtgattcacagtcaaatgatccagtcgcttacgataatggggtcacttacatgtttgtccaacacagtaacgtttaccttatgatagcctccaggcagaactgcaatgctgccagtcttctctccttccttcaccgcgtcatcgatgtctttaagcactactttgaggagttagaggaagaatcactcagggataactttgtcgttgtgtatgagttacttgatgagatgatggactttgggtaccctcagtataccgaagcaagaatcctcagtgagttcatcaagactgatgcatatagaatggaagtcacacagagacctccaatggctgtcactaatgctgtctcctggaggagtgagggattacagtacaagaagaacgaagttttcttggatgtaattgagaatgtaaatattcttgtcaacagtaatgggcaaattatcaggtctgatgttgttggagccctcaagatgcgaacttacttgactggaatgccagagtgtaagttaggactgaatgatagagtattgttggaagcgcaggggcgaacaacaaagggaaaagccattgatttggaggacatcaaattccatcagtgtgttcgattggcccgttttgaaaatgataggacgatatctttcataccacctgatggtgcttttgatctgatgacatatagactcagtactcaggtgaaaccgcttatatgggtggaagcgcaaatagaaaggcattccaaaagtcgtgttgagatgctcgtaaaagctagaagtcagttcaaggaacggagcaccgcaacgaatgttgagattgagttgcctgtaccagccgatgcatctaaccccaccgttaggacatctctggggtctgctgcttatgctcctgaaaaagatgcattggtctggaaaatcaaatctttccccgggaacaaggagtatatgttgagggcagagttccatcttcccagtataactgcagaagaagcaacacctgagcgaaaagctcctatccgtgtcaaattcgagatcccttatttcactgtctcagggattcaggttcggtacctgaagataatcgagaagagcgggtaccaagcacttccatgggtgagatacataaccatggctggtgagtatgaactaagactcgtctaa

SEQ ID NO: 286 - DNA, 1287 bp, Brassica napus
  source 1..1287: mol_type = genomic DNA
atggcaggggcggcctccgcgctgtttctgctcgacatcaaaggccgcgtcctcgtctggcgcgattaccgcggcgacgtcaccgctgctcaagccgagcgtttcttctccaaactcatcgagaaagagggagattcagagtctaatgaaccggttgtatacgataatggagtgacctacatgtttgtacagcatagtaacgtttacctcatgatagcttccaggcagaactgtaacgccgccagtcttctcttcttcctgcatcgcgtcatcgatgtcttcaagcactattttgaggagttggaggaagagtcgttgagggataactttgtggttgtgtatgagttgcttgacgagatgatggactttgggtaccctcagtatactgaagcaaggatccttagtgagttcatcaagactgatgcttataggatggaagttacgcagagacctcctatggctgttactaatgctgtttcgtggaggagtgaggggttacagtttaagaaaaacgaagttttcttggacgtggtagagagtgtaaatatccttgtgaacagtaatgggcaaattgtgaggtctgatgtcgttggagcactgaagatgcgaacatatttgagtggaatgccagagtgtaagctaggtctgaatgatagagtactgttggaagcacagggacgagcaacaaaaggaaaagctattgatttggaggacatcaaatttcaccagtgtgttcgattggcccgttttgagaacgataggacgatatcattcataccacctgatggggcttttgatttaatgacatatagactcagtacccaggtaaagcctcttatatgggtcgaagctcagatagagaggcattctaggagtcgtgttgagatgctagtaaaagcgagaagccagttcaaggaaagaagcactgcaacgaatgttgagatcgagttgcctgtaccaactgatgcatccaaccccacagttagaacatctctcgggtctgccgcatatgctcccgaaaaagatgcattggtttggaaaatcaaatctttccctgggaacaaggagtatatgttgagagcagagttccatctcccaagtataaccgcagaggaagcaacacctgagcgaaaagctcctattcgtgtcaaattcgagattccatatttcactgtttcaggaatacaggttcggtacttgaaggtcattgagaagagcgggtaccaagctcttccgtgggtgagatatataaccatggctggtgagtacgaactcaggctcatgtaa

SEQ ID NO: 287 - DNA, 1287 bp, Brassica napus
  source 1..1287: mol_type = genomic DNA
atggcaggagctgcttctgcgctgtttctgctggacatcaaaggtcgcgttctcgtctggcgtgactaccgcggcgacgtctccgcggctcaagccgaacgcttcttctctaagctcatcgagaaagagggtgattcacagtcaaatgatccagttgcttacgataatggggtcacttacatgtttgtccaacacagtaacgtttaccttatgatagcctccagacaaaactgtaatgctgccagtctcctctccttccttcaccgcgtcatcgatgtcttcaagcattactttgaggagttagaggaagaatcacttagggataactttgtcgttgtgtatgagttacttgatgagatgatggactttgggtaccctcagtataccgaagcaagaatcctcagtgagttcatcaagactgatgcatatagattggaagtcacacagagacctccaatggctgtcactaatgctgtctcctggaggagtgagggattacagtacaagaagaacgaagttttcttggatgtaattgagaatgtaaatattcttgtcaacagtaatgggcaaattatcaggtctgatgttgttggagccctcaagatgcgaacttacttgactggaatgccagagtgtaagttaggactgaatgatagagtattgttggaagcgcaggggcgagcaacaaagggaaaagccattgatttggaggacatcaaattccatcagtgtgttcgattggcccgttttgaaaatgataggacgatatctttcataccacctgatggtgcttttgatctgatgacatatagactcagtactcaggtgaaaccgcttatatgggtggaagcgcaaatagaaaggcattccaaaagtcgtgttgagatgctcgtaaaagctagaagtcagttcaaggaacggagcaccgcaacgaatgttgagattgagttgcctgtaccagccgatgcatctaaccccaccgttaggacatctctggggtctgctgcttatgctcctgaaaaagatgcattagtctggaaaatcaaatctttccccgggaacaaggattacatgttgagggcagagttccatcttcctagtataactgcagaagaagcaacacctgagcgaaaagctcctatccgtgtcaaattcgagatcccttatttcactgtctcagggattcaggttcggtacctgaagataatcgagaagagcgggtaccaagcacttccatgggtgagatacataaccatggctggtgagtacgaactaagactcgtctaa

SEQ ID NO: 288 - DNA, 1716 bp, Zea mays
  source 1..1716: mol_type = genomic DNA
aggcacccggatccagccctctctcccttctccacttccgtttccggattcttgcgtttccaagtccgatacaaaccagcgccgcgccgcgcgagcacgtcgggcgacgttgcggcaggcgagatccgagaacactcctccctcgcgcccccgcacccgcatggccgccgctggccgcagatagggaggcgcaggcgggggcgtgcagatccagatccggtgggcggcgaggacgagatcgccccctaccaccatggcgggcgccgtgtcggcgctcttcctgctggacattaagggccgcgtcctcgtctggcgcgactatcgtggtgatgtctccgcgctccaggccgagcgcttcttcaccaagctcctcgacaaggagggcgactcggaagtccactcgcctgtggtctacgacgacgccggcgtcacgtacatgttcatccagcacaacaatgtcttcctcctcaccgctgctcgccagaactgcaacgcggccagcatcctcctcttcctccaccgtgtcgtagatgtgtttaagcactacttcgaggaactggaagaggagtcgctcagagataacttcgtcgttgtgtatgagttgctggatgagatgatggatttcgggtacccacaatacacggaggcgaagatcctaagtgagttcatcaagacagatgcgtacaggatggaggtcacacagcgtccacccatggccgtgacaaatgctgtgtcatggaggagcgaggggatccgttacaagaagaatgaagtcttcttggatgtagtagagagtgttaacattctagttaacagcaatgggcagattgtgagatcagatgtggttggggcactgaagatgcgaacatatttgagtggaatgcctgagtgcaaactcggcttgaatgatagggttcttttggaggctcaaggcagagcaactaaaggaaaagcgatagaccttgatgatatcaaatttcatcagtgtgtacgtttagctagattcgagaatgatagaactatatcgttcatacctcctgatggatcttttgatctaatgacatacaggcttagcactcaggtaaaacctcttatctgggtcgaagcacagattgagaaacattctagaagccgtatagaactcatggtgaaggcaaggagtcagttcaaggaaagaagcacagcaacaaatgttgaaattgaagtgcctgttccttcagatgccacaaacccaaatataagaacttcaatgggttctgctgcatatgctcctgagagagatgcaatggtctggaaagtaaaatcattccctggtggcaaggaatacatgtgcagagcagaatttagtcttcctagcataacagcggaagaaggggccccagaaaagaaggcaccaatacgagtgaaatttgagataccatatttcaccgtatcaggtattcaggtccgttatctgaagataattgaaaagagtggttaccaggcactcccctgggttagatatatcacgatggctggcgaatatgagctgagacttatatgagttttctcttttctggctgatggaagacatttatgaagctgcaagatacatatttgctcgagacagcaaccgtatgacatttgaatgttagcctggacgtcttctgccgaccacacaaggttttccccctgggggcttgttcatcttgttaggctcaccttaccttggttatt

SEQ ID NO: 289 - DNA, 2027 bp, Zea mays
  source 1..2027: mol_type = genomic DNA
gcgtttccaagtccgatacaaaccagcgccgcgccgcgcgagcacgtcgggcgacgttgcggcaggcgagatccgagaacactcctccctcgcgcccccgcacccgcatggccgccgctggccgcagatagggaggcgcaggcgggggcgtgcagatccagatccggtgggcggcgaggacgagatcgccccctaccaccatggcgggcgccgtgtcggcgctcttcctgctggacattaagggccgcgtcctcgtctggcgcgactatcgtggtgatgtctccgcgctccaggccgagcgcttcttcaccaagctcctcgacaaggagggcgactcggaagtccactcgcctgtggtctacgacgacgccggcgtcacgtacatgttcatccagcacaacaatgtcttcctcctcaccgctgctcgccagaactgcaacgcggccagcatcctcctcttcctccaccgtgtcgtagatgtgtttaagcactacttcgaggaactggaagaggagtcgctcagagataacttcgtcgttgtgtatgagttgctggatgagatgatggatttcgggtacccacaatacacggaggcgaagatcctaagtgagttcatcaagacagatgcgtacaggatggaggtcacacagcgtccacccatggccgtgacaaatgctgtgtcatggaggagcgaggggatccgttacaagaagaatgaagtcttcttggatgtagtagagagtgttaacattctagttaacagcaatgggcagattgtgagatcagatgtggttggggcactgaagatgcgaacatatttgagtggaatgcctgagtgcaaactcggcttgaatgatagggttcttttggaggctcaaggcagagcaactaaaggaaaagcgatagaccttgatgatatcaaatttcatcagtgtgtacgtttagctagattcgagaatgatagaactatatcgttcatacctcctgatggatcttttgatctaatgacatacaggcttagcactcaggtaaaacctcttatctgggtcgaagcacagattgagaaacattctagaagccgtatagaactcatggtgaaggcaaggagtcagttcaaggaaagaagcacagcaacaaatgttgaaattgaagtgcctgttccttcagatgccacaaacccaaatataagaacttcaatgggttctgctgcatatgctcctgagagagatgcaatggtctggaaagtaaaatcattccctggtggcaaggaatacatgtgcagagcagaatttagtcttcctagcataacagcggaagaaggggccccagaaaagaaggcaccaatacgagtgaaatttgagataccatatttcaccgtatcaggtattcaggtccgttatctgaagataattgaaaagagtggttaccaggcactcccctgggttagatatatcacgatggctggcgaatatgagctgagacttatatgagttttctcttttctggctgatggaagacatttatgaagctgcaagatacatatttgctcgagacagcaaccgtatgacatttgaatgttagcctggacgtcttctgccgaccacacaaggttttccccctgggggcttgttcatcttgttaggctcaccttaccttggttattgtacgttacccatcaagtatagtttttgaaaaaaagagaggataattttaattttcatctctcttgtattattattgatttatttttgtgggtaccaaacttggatttgtttcatctgatcgagttcacaaaaacactgccattactgggtgatggttctgaactgcaggttgaaacaattgtgccctttactgtaaatgtcgtcgtcttgtatccaggcaaaagaaaggaaacctaccgagacctattatgacatcaataatttcaacttttttttgtttcaattatttcttttaatgtggagttcttgttatgccaatttctgcgtattctaagaaaggtcactatggcagaatccttttgg

SEQ ID NO: 290 - DNA, 2044 bp, Zea mays
  source 1..2044: mol_type = genomic DNA
aggcacccggatccagccctctctcccttctccacttccgtttccggattcttgcgtttccaagtccgatacaaaccagcgccgcgccgcgcgagcacgtcgggcgacgttgcggcaggcgagatccgagaacactcctccctcgcgcccccgcacccgcatggccgccgctggccgcagatagggaggcgcaggcgggggcgtgcagatccagatccggtgggcggcgaggacgagatcgccccctaccaccatggcgggcgccgtgtcggcgctcttcctgctggacattaagggccgcgtcctcgtctggcgcgactatcgtggtgatgtctccgcgctccaggccgagcgcttcttcaccaagctcctcgacaaggagggcgactcggaagtccactcgcctgtggtctacgacgacgccggcgtcacgtacatgttcatccagcacaacaatgtcttcctcctcaccgctgctcgccagaactgcaacgcggccagcatcctcctcttcctccaccgtgtcgtagatgtgtttaagcactacttcgaggaactggaagaggagtcgctcagagataacttcgtcgttgtgtatgagttgctggatgagatgatggatttcgggtacccacaatacacggaggcgaagatcctaagtgagttcatcaagacagatgcgtacaggatggaggtcacacagcgtccacccatggccgtgacaaatgctgtgtcatggaggagcgaggggatccgttacaagaagaatgaagtcttcttggatgtagtagagagtgttaacattctagttaacagcaatgggcagattgtgagatcagatgtggttggggcactgaagatgcgaacatatttgagggttcttttggaggctcaaggcagagcaactaaaggaaaagcgatagaccttgatgatatcaaatttcatcagtgtgtacgtttagctagattcgagaatgatagaactatatcgttcatacctcctgatggatcttttgatctaatgacatacaggcttagcactcaggtaaaacctcttatctgggtcgaagcacagattgagaaacattctagaagccgtatagaactcatggtgaaggcaaggagtcagttcaaggaaagaagcacagcaacaaatgttgaaattgaagtgcctgttccttcagatgccacaaacccaaatataagaacttcaatgggttctgctgcatatgctcctgagagagatgcaatggtctggaaagtaaaatcattccctggtggcaaggaatacatgtgcagagcagaatttagtcttcctagcataacagcggaagaaggggccccagaaaagaaggcaccaatacgagtgaaatttgagataccatatttcaccgtatcaggtattcaggtccgttatctgaagataattgaaaagagtggttaccaggcactcccctgggttagatatatcacgatggctggcgaatatgagctgagacttatatgagttttctcttttctggctgatggaagacatttatgaagctgcaagatacatatttgctcgagacagcaaccgtatgacatttgaatgttagcctggacgtcttctgccgaccacacaaggttttccccctgggggcttgttcatcttgttaggctcaccttaccttggttattgtacgttacccatcaagtatagtttttgaaaaaaagagaggataattttaattttcatctctcttgtattattattgatttatttttgtgggtaccaaacttggatttgtttcatctgatcgagttcacaaaaacactgccattactgggtgatggttctgaactgcaggttgaaacaattgtgccctttactgtaaatgtcgtcgtcttgtatccaggcaaaagaaaggaaacctaccgagacctattatgacatcaataatttcaacttttttttgtttcaattatttcttttaatgtggagttcttgttatgccaatttctgcgtattctaagaaaggtcactatggcagaatccttttgg

SEQ ID NO: 291 - DNA, 1959 bp, Zea mays
  source 1..1959: mol_type = genomic DNA
aggtcccaccgttcagtggacgtaagaaagacacccggatcctgcgctctccttaccctctccacttccgtttccggatcccgtttccagctccgatccaacccagcatctgtaccgcgccgcgcgagcacgtccggcgccggtgcggcaggcgaaatccgagagcactcctcccccgctacgccgcaccgcccatggccgcagctagccgcagatagagagaggcgcaggcgagggcgtgcagatccagatccggtgggcgggaaggacttgatcgcccccaccaccatggccggcgcggtgtcggcgctcttcctgctggacatgaagggccgcgttctcgtctggcgcgactaccgcggcgatgtctccgcgctccaggccgagcgcttcttcaccaagctcctcgacaaggagggcgattcggaagtgcactcgcctgtggtctacgacgacgctggcgtcacttacatgttcatccagcacaacaatgtcttcctcctcaccgccgctcgccagaactgtaacgcggccagcatcctcctcttcctccaccgtgtaatagatgtgtttaagcactacttcgaggagctggaggaagagtcgctcagagataacttcgtcgttgtgtatgagttgctcgatgagatgatggattttgggtacccacaatacacggaggcgaagatattgagtgagttcatcaagacagatgcatacaggatggaggtcacacagcgtccacccatggccgtgacaaatgctgtgtcatggaggagcgaggggatccggtacaagaagaatgaagtcttcttggatgtagtggagagtgttaacattctagttaacagcaatggccagattgtgagatcagatgtggttggggcactgaagatgcgaacatatttgagtggaatgccggagtgcaaacttggcttgaatgatagggttcttttggaggctcaaggcagagcaactaaaggcaaagcgatagacctcgatgatatcaaatttcatcagtgtgtacgtttggctagatttgagaatgatagaactatatcgttcatacctcctgatggatcttttgatctaatgacatacaggcttagcactcaggtaaaacctcttatctgggtcgaagcacagattgagaaacattctagaagccgtatagaactcatggtgaaggcaaggagtcagtttaaagaaagaagcacagcaacgaatgttgaaattgaagtgcctgttccttcagatgccacaaacccaaatataagaacttcaatggggtctgctgcatatgctcctgagagagatgcaatggtttggaaaataaaatcattccctggtggcaaggaatacatgtgcagagcagaatttagtcttcctagcataacagcggaagaaggggccccagaaaagaaggcgccgatacgggtgaaatttgagataccatatttcaccgtatcaggtattcaggtccgttatctgaagataattgaaaagagtggttatcaggcactcccctgggttagatatatcacaatggctggtgaatatgagctgagacttatatgagttctctcttctctggctgccggacgacttttgaagctgcaggacactaaagatacatatttgctatcgacacagcgaacagttttcatttggatgttggcctggaagtcttctgccgaccatacccctccccgtggtggggcttgctgttcatcttgttaggctcaccttaccctggttattgtaagttaccaatcaagtacagttttggaggaaaggatattcagttttcagttcacttgtattgttattgatttattttgtgggtaccaaactagatttgtttcgttctgtattacacggaaaacattgccacatctggcgatgattctggggtgcgggttgaaacaaatttgcccttttttttactgtaaatgtcgt

SEQ ID NO: 292 - DNA, 1973 bp, Zea mays
  source 1..1973: mol_type = genomic DNA
aggtcccaccgttcagtggacgtaagaaagacacccggatcctgcgctctccttaccctctccacttccgtttccggatcccgtttccagctccgatccaacccagcatctgtaccgcgccgcgcgagcacgtccggcgccggtgcggcaggcgaaatccgagagcactcctcccccgctacgccgcaccgcccatggccgcagctagccgcagatagagagaggcgcaggcgagggcgtgcagatccagatccggtgggcgggaaggacttgatcgcccccaccaccatggccggcgcggtgtcggcgctcttcctgctggacatgaagggccgcgttctcgtctggcgcgactaccgcggcgatgtctccgcgctccaggccgagcgcttcttcaccaagctcctcgacaaggagggcgattcggaagtgcactcgcctgtggtctacgacgacgctggcgtcacttacatgttcatccagcacaacaatgtcttcctcctcaccgccgctcgccagaactgtaacgcggccagcatcctcctcttcctccaccgtgtaatagatgtgtttaagcactacttcgaggagctggaggaagagtcgctcagagataacttcgtcgttgtgtatgagttgctcgatgagatgatggattttgggtacccacaatacacggaggcgaagatattgagtgagttcatcaagacagatgcatacaggatggaggtcacacagcgtccacccatggccgtgacaaatgctgtgtcatggaggagcgaggggatccggtacaagaagaatgaagtcttcttggatgtagtggagagtgttaacattctagttaacagcaatggccagattgtgagatcagatgtggttggggcactgaagatgcgaacatatttgagtggaatgccggagtgcaaacttggcttgaatgatagggttcttttggaggctcaaggcagagcaactaaaggcaaagcgatagacctcgatgatatcaaatttcatcagtgtgtacgtttggctagatttgagaatgatagaactatatcgttcatacctcctgatggatcttttgatctaatgacatacaggcttagcactcaggtaaaacctcttatctgggtcgaagcacagattgagaaacattctagaagccgtatagaactcatggtgaaggcaaggagtcagtttaaagaaagaagcacagcaacgaatgttgaaattgaagtgcctgttccttcagatgccacaaacccaaatataagaacttcaatggggtctgctgcatatgctcctgagagagatgcaatggtttggaaaataaaatcattccctggtggcaaggaatacatgtgcagagcagaatttagtcttcctagcataacagcggaagaaggggccccagaaaagaaggcgccgatacgggtgaaatttgagataccatatttcaccgtatcaggtattcaggtccgttatctgaagataattgaaaagagtggttatcaggcactcccctgggttagatatatcacaatggctggtgaatatgagctgagacttatatgagttctctcttctctggctgccggacgacttttgaagctgcaggacactaaagatacatatttgctatcgacacagcgaacagttttcatttggatgttggcctggaagtcttctgccgaccatacccctccccgtggtggggcttgctgttcatcttgttaggctcaccttaccctggttattgtaagttaccaatcaagtacagttttggaggaaaggatattcagttttcagttcacttgtattgttattgatttattttgtgggtaccaaactagatttgtttcgttctgtattacacggaaaacatgggctgatttgagttcaacaaaacattgccacatctggcgatgattctggggtgcgggttgaaacaaatttgcccttttttttac

SEQ ID NO: 293 - DNA, 1287 bp, Beta vulgaris
  source 1..1287: mol_type = genomic DNA
atgtcgggagcggcctctgcgctgttccttctagacattaaaggtagagttctcatatggcgggattatcgcggcgatgtttcagcggttcaagctgagagattcttcactaagttcattgagaaagagggggatccacagtcacaagatccagtcgtgcacgataatggtattacatacatgttcatacaacacaacaatgtgtatctacttattgctgctagacaaaactgcaatgctgctagtcttcttctctttctccaccgtttagttgatgttttcaaacattactttgaagaactagaagaggaatctcttagagataactttgttgtagtgtatgagttacttgacgagattatggatttcggttaccctcagttcactgaagcaaagatccttagtgagtttattaaaactgatgcttatcggatggaagtcacacaaaggcctcccatggctgtaacgaatgcagtttcatggcgtagtgaaggaatagcttacaagaagaatgaagtattcttggatgttgttgagagtgttaatatacttgtaaacagcaatgggcaaataattagatcagatgttgttggggcattgaagatgagaacgtatttaagtgggatgcctgaatgtaaactaggcctgaatgacagagttttactggaggctcaagggcgaactactaaggggaaggctatcgacctggacgatattaaatttcatcagtgtgtgcgtctggctcgttttgaaaatgataggaccatatcatttatacctcctgatggatcctttgatctcatgacatatagactcagtactcaggtgaagcctttagtttgggttgaagcacagattgagagacactcaagaagtcgtattgaaataatggtgaaagcaagaagccagtttaaggagcgaagcactgcaacaaatgttgagattgaacttccagtgccagctgatgccaccaatccaaatattcgcacatcaatggggtctgcttcttatgcccctgagaaggatgctttagtttggaagataaaatctttccctggtggcaaggaatacatgttgagggcagagttcagtcttcctagcatcaccagtgatgaggcaactcctgaaagaaaagctcctatacgtgtaaaatttgaaatcccgtatttcacagtttcaggaatccaggttcgttatcttaagatcattgaaaagagtggataccaggctctgccatgggtgaggtacataacaatggctggcgagtatgagctgaggctaatgtaa

SEQ ID NO: 294 - protein, 428 aa, Pisum sativum
MSGAASALFLLDIKGRVLIWRDYRGDVTAVEAERFFTKLIEKEGDPQSQDPVVYDNGVSYMFVQHSNVYLMTATRQNCNAASLIFFLHRIVDVFKHYFEELEEESLRDNFVVVYELLDEIMDFGYPQYTEAKILSEFIKTDAYRMEVTQRPPMAVTNAVSWRSEGINYKKNEVFLDVVESVNILVNSNGQIIRSDVVGALKMRTYLSGMPECKLGLNDRVLLEAQGRATKGKAIDLEDIKFHQCVRLARFENDRTISFIPPDGSFDLMTYRLSTQVKPLFWVEAQVEKHSKSRIEITVKARSQFKERSTATNVEIELPVPADATTPNVRTSMGSAAYAPEKDALIWKIRSFPGGKEYMLRAEFRLPSITDEEATPERKAPIRVKFEIPYFTVSGIQVRYLKIIEKSGYQALPWVRYITTGGEYELRLI

SEQ ID NO: 295 - protein, 428 aa, Pisum sativum
MSGAASALFLLDIKGRILVWRDYRGDVSAIEAERFFTKFIDKQADEQCQDPVVYDNGVTYMFIQHSNVYLAIAARQNCNAASLIFFLHRLVDVFKHYFEELEEESLRDNFVVVYELLDEIMDFGYPQYTEAKILSEFIKTDAYRMEVTQRPPMAVTNAVSWRSEGISYKKNEVFLDVVESVNILVNSNGQLIRSDVVGALKMRTFLSGMPECKLGLNDRVLLEAQGRTTKGKAIDLEDIKFHQCVRLARFENDRTISFIPPDGSFDLMTYRLSTQVKPLLWVEATVEKHSKSRIEIMVKARSQFKERSTATNVEIELPVPVDATNPNIRTSMGSASYAPEKDALIWKIRSFPGGKEYMLRAEFRLPSITDEEATPERKAPIRVKFEIPYFTVSGIQVRYLKIIEKSGYQALPWVRYITMAGEYELRLI

SEQ ID NO: 296 - protein, 428 aa, Glycine max; identical to SEQ ID NO: 78

SEQ ID NO: 297 - protein, 428 aa, Glycine max; identical to SEQ ID NO: 79

SEQ ID NO: 298 - protein, 428 aa, Glycine max
MAGAASALFLLDIKGRVLIWRDYRGDVSALDAERFFTKLIEKQADPQAQDPVVHDNGVTYMFIQHSNVYLMIATRQNCNAASLLFFLHRIVDVFKHYFEELEEESLRDNFVVVYELLDEIMDFGYPQYTEAQILSEFIKTDAYRMEVTQRPPMAVTNAVSWRSEGINYKKNEVFLDVVESVNILVNSNGQIIRSDVVGALKMRTYLSGMPECKLGLNDRVLLEAQGRTTKGKAIDLEDIKFHQCVRLARFENDRTISFIPPDGSFDLMTYRLSTQVKPLIWVEASVEKHSKSRIEIMVKARSQFKERSTATNVEIELPVPVDATNPNVRTSMGSASYAPEKDALIWKIRSFPGGKEYMLRAEFRLPSITDEEATPERKAPIRVKFEIPYFTVSGIQVRYLKVIEKSGYQALPWVRYITMAGEYELRLI

SEQ ID NO: 299 - protein, 428 aa, Glycine max
MAGAASALFLLDIKGRVLIWRDYRGDVSALDAERFFTKLIEKQADPQAQDPVVHDNGVTYMFIQHSNVYLMIATRHNCNAASLLFFLHRIVDVFKHYFEELEEESLRDNFVVVYELLDEIMDFGYPQYTEAQILSEFIKTDAYRMEVTQRPPMAVTNAVSWRSEGINYKKNEVFLDVVESVNILVNSNGQIIRSDVVGALKMRTYLSGMPECKLGLNDRVLLEAQGRTTKGKAIDLEDIKFHQCVRLARFENDRTISFIPPDGSFDLMTYRLSTQVKPLIWVEANVEKHSKSRIEIMVKARSQFKERSTATNVEIELPVPVDATNPNVRTSMGSASYAPEKDALIWKIRSFPGGKEYMLRAEFHLPSITDEEATPERKAPIRVKFEIPYFTVSGIQVRYLKIIEKSGYQALPWVRYITMAGEYELRLI

SEQ ID NO: 300 - protein, 428 aa, Helianthus annuus; identical to SEQ ID NO: 80

SEQ ID NO: 301 - protein, 431 aa, Helianthus annuus
MSMAGAASALFLLDIKGRVLVWRDYRGDVSALQAERFFTKHIEKEGDDAGSQGPVVYDKGVTYMFIQHNNLYLMTASRQNCNAASLLLFLHRLVDVFKHYFEELEEESLRDNFVVVYELLDEMMDFGYPQFTEATILSEFIKTDAYRMEVSQRPPMAVTNAVSWRSEGIHYKKNEVFLDVVENVNILVNSNGQIVRSEVIGALKMRTYLSGMPECKLGLNDRVLLEAQGRTTKGKAIDLDDIKFHQCVRLARFENDRTISFVPPDGAFDLMTYRLSTQVKPLIWVEAQVERHSKSRVEIMVKARSQFKERSTATNVEIELPVPADAINPNIRTSMGSAAYAPENDALCWKIKSFPGGKEYMLRAEFNLPSITAEEALPERKAPIRVKFEIPYFTISGIQVRYLKIIEKSGYQALPWVRYITMAGEYELRLV

SEQ ID NO: 302 - protein, 428 aa, Helianthus annuus
MAGAVSALFILDIKGRCLISRHYRGDILSVEAERFFTKLLENEEDIEAQGPVVFDNGVSHIFIRHNNVYLMAVSRQNCNVASLIAFLHKLADVFEYYFEELVEESLRDNFVVVYELLDEMMDFGYPQYTEATILSEFIKTDAYRLEVTQRPPMAVTNAVSWRNEGIYYKKNEVFLDVIESVNILVNSNRQLIRSEVGGALKMRTCLSGMPECKLGLNDRVLMDAQDRSSKGKCIDLEDIRFHQCVRLARYEKDRTISFIPPDGSFDLMTYRISTQVKPLIWVEAQIEKHARSRIEMLVKARSQFRERSNATNVQISIPVPSDATKPIVRTTMGAASYAPEHDSLIWRIRSFPGDKEYMLGAEFRLPSVAYEDPTPNKKTPIRVKFEIPYFTVSGIQVRHLKVIEKSAYQTLPWVRYITMAGEYEIRLQ

SEQ ID NO: 303 - protein, 429 aa, Sorghum bicolor; identical to SEQ ID NO: 92

SEQ ID NO: 304 - protein, 428 aa, Brassica napus; identical to SEQ ID NO: 65

SEQ ID NO: 305 - protein, 428 aa, Brassica napus; identical to SEQ ID NO: 66

SEQ ID NO: 306 - protein, 428 aa, Brassica napus
MAGAASALFLLDIKGRVLVWRDYRGDVTAAQAERFFTKLIEKEGDSESNDPVVYDNGVTYMFVQHSNVYLMIASRQNCNAASLLFFLHRVIDVFKHYFEELEEESLRDNFVVVYELLDEMMDFGYPQYTEARILSEFIKTDAYRMEVTQRPPMAVTNAVSWRSEGLQFKKNEVFLDVVESVNILVNSNGQIVRSDVVGALKMRTYLSGMPECKLGLNDRVLLEAQGRATKGKAIDLEDIKFHQCVRLARFENDRTISFIPPDGAFDLMTYRLSTQVKPLIWVEAQIERHSRSRVEMLVKARSQFKERSTATNVEIELPVPTDASNPTVRTSLGSAAYAPEKDALVWKIKSFPGNKEYMLRAEFHLPSVTAEEATPERKAPIRVKFEIPYFTVSGIQVRYLKVIEKSGYQALPWVRYITMAGEYELRLM

SEQ ID NO: 307 - protein, 428 aa, Brassica napus
MAGAASALFLLDIKGRVLVWRDYRGDVSAAQAERFFSKLIEKEGDSQSNDPVAYDNGVTYMFVQHSNVYLMIASRQNCNAASLLSFLHRVIDVFKHYFEELEEESLRDNFVVVYELLDEMMDFGYPQYTEARILSEFIKTDAYRMEVTQRPPMAVTNAVSWRSEGLQYKKNEVFLDVIENVNILVNSNGQIIRSDVVGALKMRTYLTGMPECKLGLNDRVLLEAQGRTTKGKAIDLEDIKFHQCVRLARFENDRTISFIPPDGAFDLMTYRLSTQVKPLIWVEAQIERHSKSRVEMLVKARSQFKERSTATNVEIELPVPADASNPTVRTSLGSAAYAPEKDALVWKIKSFPGNKEYMLRAEFHLPSITAEEATPERKAPIRVKFEIPYFTVSGIQVRYLKIIEKSGYQALPWVRYITMAGEYELRLV

SEQ ID NO: 308 - protein, 428 aa, Brassica napus
MAGAASALFLLDIKGRVLVWRDYRGDVTAAQAERFFSKLIEKEGDSESNEPVVYDNGVTYMFVQHSNVYLMIASRQNCNAASLLFFLHRVIDVFKHYFEELEEESLRDNFVVVYELLDEMMDFGYPQYTEARILSEFIKTDAYRMEVTQRPPMAVTNAVSWRSEGLQFKKNEVFLDVVESVNILVNSNGQIVRSDVVGALKMRTYLSGMPECKLGLNDRVLLEAQGRATKGKAIDLEDIKFHQCVRLARFENDRTISFIPPDGAFDLMTYRLSTQVKPLIWVEAQIERHSRSRVEMLVKARSQFKERSTATNVEIELPVPTDASNPTVRTSLGSAAYAPEKDALVWKIKSFPGNKEYMLRAEFHLPSITAEEATPERKAPIRVKFEIPYFTVSGIQVRYLKVIEKSGYQALPWVRYITMAGEYELRLM

SEQ ID NO: 309 - protein, 428 aa, Brassica napus
MAGAASALFLLDIKGRVLVWRDYRGDVSAAQAERFFSKLIEKEGDSQSNDPVAYDNGVTYMFVQHSNVYLMIASRQNCNAASLLSFLHRVIDVFKHYFEELEEESLRDNFVVVYELLDEMMDFGYPQYTEARILSEFIKTDAYRLEVTQRPPMAVTNAVSWRSEGLQYKKNEVFLDVIENVNILVNSNGQIIRSDVVGALKMRTYLTGMPECKLGLNDRVLLEAQGRATKGKAIDLEDIKFHQCVRLARFENDRTISFIPPDGAFDLMTYRLSTQVKPLIWVEAQIERHSKSRVEMLVKARSQFKERSTATNVEIELPVPADASNPTVRTSLGSAAYAPEKDALVWKIKSFPGNKDYMLRAEFHLPSITAEEATPERKAPIRVKFEIPYFTVSGIQVRYLKIIEKSGYQALPWVRYITMAGEYELRLV

SEQ ID NO: 310 - protein, 429 aa, Zea mays; identical to SEQ ID NO: 92

SEQ ID NO: 311 - protein, 429 aa, Zea mays; identical to SEQ ID NO: 92

SEQ ID NO: 312 - protein, 417 aa, Zea mays
MAGAVSALFLLDIKGRVLVWRDYRGDVSALQAERFFTKLLDKEGDSEVHSPVVYDDAGVTYMFIQHNNVFLLTAARQNCNAASILLFLHRVVDVFKHYFEELEEESLRDNFVVVYELLDEMMDFGYPQYTEAKILSEFIKTDAYRMEVTQRPPMAVTNAVSWRSEGIRYKKNEVFLDVVESVNILVNSNGQIVRSDVVGALKMRTYLRVLLEAQGRATKGKAIDLDDIKFHQCVRLARFENDRTISFIPPDGSFDLMTYRLSTQVKPLIWVEAQIEKHSRSRIELMVKARSQFKERSTATNVEIEVPVPSDATNPNIRTSMGSAAYAPERDAMVWKVKSFPGGKEYMCRAEFSLPSITAEEGAPEKKAPIRVKFEIPYFTVSGIQVRYLKIIEKSGYQALPWVRYITMAGEYELRLI

SEQ ID NO: 313 - protein, 429 aa, Zea mays
MAGAVSALFLLDMKGRVLVWRDYRGDVSALQAERFFTKLLDKEGDSEVHSPVVYDDAGVTYMFIQHNNVFLLTAARQNCNAASILLFLHRVIDVFKHYFEELEEESLRDNFVVVYELLDEMMDFGYPQYTEAKILSEFIKTDAYRMEVTQRPPMAVTNAVSWRSEGIRYKKNEVFLDVVESVNILVNSNGQIVRSDVVGALKMRTYLSGMPECKLGLNDRVLLEAQGRATKGKAIDLDDIKFHQCVRLARFENDRTISFIPPDGSFDLMTYRLSTQVKPLIWVEAQIEKHSRSRIELMVKARSQFKERSTATNVEIEVPVPSDATNPNIRTSMGSAAYAPERDAMVWKIKSFPGGKEYMCRAEFSLPSITAEEGAPEKKAPIRVKFEIPYFTVSGIQVRYLKIIEKSGYQALPWVRYITMAGEYELRLI

SEQ ID NO: 314 - protein, 429 aa, Zea mays; identical to SEQ ID NO: 313

SEQ ID NO: 315 - protein, 428 aa, Beta vulgaris; identical to SEQ ID NO: 64

SEQ ID NO: 316 - DNA, 2513 bp, Glycine max
  source 1..2513: mol_type = genomic DNA
gaaaaactaattttgaatttcaacgacaaaatagacgccgaagtacaagtattcttctcgaattaggacagaacattcccgttgcatagtattgtgagagattcatggtcgtgtccttaattcaaacttgaaaacttgcaccccttcacaaaattccacaagtctcagtcactcccaatgctggtttcaacgctgaaaccatggtggagttggatgcaaaagcctctactccactccttcatcagagccataacaactcttacaccaatacctccacacacttttcttcaccttcacaaccccagcgacagtgtcatctacctcaagaaccgcgaaatcgacgctttcataaaacttagaaacctgaacgctgcactcgcagtgttccacaccacgccactgcgcgacactgtcacctacaacttaattatttccgcgttccgaaaccaaccaaatcacgctcttcgtttctacgctgaaatgggtttgcgtggaataagagaaagcccaaccacgttaacctctgttatagcggtttgcaccaacgctatgtttttcaaagagggtgttcaggtgcattgcagggtgatcaagttcgggtttacatgcaacgtgttcgtgggtggtgcacttgttgggttttacgcgcacgtgggggaatgtggggtggcactggacttgtttgatgagttgccagagagaaacttggctgtctggaacgtcatgctgcgtgggttgtgtgaactgggtcgtgtaaatgttgaagacttgatggggttttattaccctcggatgctttttgaaggtgtgcagccaaatggggttacgttttgttatttgcttagaggctgtggtaatcagagacggttggaggaagggaagaagattcaagggtgcgttttgaagatgggtttggtggaatcgagtgtttttgttgccaatgctctggtggatttttactctgcgtgtgggtgttttgttggtgcaaggaggtgttttgaggacatagaaaacgaggatgttatttcgtggaactcgttggtttcggtttatgcggagaataatatgttaattgaggctttggaggtgttttgtgtcatgcaagtgtggaggaaaaggccatcaattcgttctttggtgggtttgttgaatttgtgcagtagaagtggagagctttgtttggggaagcaggttcattgtcatgtgatgaagtttggttttgatgaagggagtgtgcatgttcaatctgctttgattgatatgtatggaaagtgcatggacattgagagttctgtgaatgtatttgaatgccttcccaagagaactttggattgtttcaactcattgatgacctctttgtcttattgtgatgcggttgacgatgtggttgaattgtttggtttgatgtttgacgagggtcttgtgccggatggagttaccttatcaaccacactgagggcattgtcagtgtccactttagcaagttttacgagttcccagttactacattgttatgcattaaaatctggacttggaggagatgctgcagttgcatgttccctcgtggattcatattcaagatggggccatgtggagctttctcgtcgaatttttgagagtcttccttctccaaatgctatttgcttcacatccatgatcaatgcatatgcccgaaatggagcggggaaagaaggaattgcagtgcttcaagctatgattgagaggggactaaagcctgatgatgttaccttattatgtgcactaaatggttgtaaccacacaggattagttgaggaaggaagattagtctttgaatcgatgaaatctcttcatggggtcgatccagatcaccgccatttttcatgcatggtggatctcttttgccgtgcaggacttctacatgaagctgaagagttgctgctacaggcaccgggaaaaggagactgttttatgtggagctctttgctgagaagttgcagggtccacaagaatgaagaggttggaacaagagcagcacaagtgttagttgagctagatccagatgaccctgcagtgtggttgcaagcttcaattttttatgctgaaatagggaattttgatgcatcaaggcaaatcagagaggttgctctatcaaggaagatgactagggaaattggtcatagtttaactgagataagacaatgacaggggaaaatagagttcctgaattgatgaagcattttcgcccattattcacagaagataagacaatcatgtcattttgatgagatgatgaagatgtttcctaagatggtaaggtcttgtctatttgggcaatcctacaatctaagggaaaggtttcttttgtaaggagtttttggtgagcatgcctagaaaatgagggtcggcatttgtattcccatgtttggtgtaactaactgacatcttctaaagatagaaaaataatttttctcccttttatgtatcacatggtattatgcctctatactagtgcaatttgagatatagagtgg

SEQ ID NO: 317 - DNA, 1995 bp, Helianthus annuus; identical to SEQ ID NO: 135
  source 1..1995: mol_type = genomic DNA

SEQ ID NO: 318 - DNA, 3425 bp, Sorghum bicolor
  source 1..3425: mol_type = genomic DNA
atgcccgtccgccaccgcgcgtctcgttcggaggcccgcggcccgcggccctcagtccaacgctcgtgcacctccccgccgggccgcccgagcatatcccctccagagagccgcccgccggagccctccacccgagcacctcccctcaagagcgcatccctcgccggagccagacgcctcccccgccgagcgcatctctgcctacgagagcatccgtcgcccgaggttgtacgctgcaccccctccctcccctacgagagcatccgtcgccctcgcccgaggttgcaggctcagcctccaggcctctacggactacggtggagaaggagaatggaggatgctgccaaacggtagacttttgccggcttcttacttgctcaaaaagcttacttcttacaaaagctcctaatatttaagccgttccataaaactatctacttcactgtacacgcatttctttgatcgcttcactgcgagttccggcgctagacagacacatcagttccctaacttcaggaagcggaaatagacatagctctaggcaaagaaataagtatagagaatggggtactatatctttgcctacggcgttgatgatgagcaaacagctccggctattccctccaatgtgctctgtgtagcaattgcaaactctagcaccagctcccaggtcttcaattcgaatgaagatcttggcaaacagccaaagccaacaggtgcagggactgagatgtcttcttggattttttttcctcgaaagtgtaatctgtttggtgtatatggaaaatctttcaactttgaatcttgtgtgagaaaacatgtatcatggtttgacagtgatggtctggtggatgagaattgggaaataccaactcactacatctaaattacattctccttaggtggattggggaatttttgtgcttagtactgatcagttttgattattgaagtttaacgagttgaatatgataacaacttatggtgacaataattgatttttaattcaacaacttgttaaaaactgtgaggaagcccttcctcacagataacccatagtttttgtttcagtctgaatgttcattgaatggtgagacagtcttttttttaatctgaagtatggccttctggcatcagtgtagaaatttaaagttgcccttgtatgctaaacgtggcggttacaatctgtccttcaaatcttcagtagagaatgtgagttgtaccaaaatctactgtttacctagatgatattaacaagtggtgcttagatagccatattctagttttcattttatttttatgaccctaagcaaactgttctgaagttcctgtacactcgctcatctgattttgagtaggtgacaacggcgtcaaagtgttttggaccaggttgagatgacactctgcttcacaaaaaccatctccactgtttctctgcactggggagctcactgcagactgatggaaatcagagagatgattgctgcttggacgcttccctcttcaccaacttgacaatcccacaaatttgtatggtgatctcactcctgcaagttgcacataccagcgaggaagaacagagccccaagcatcactactgtttccgctggatccatcagtgttcagtgaggctgtttgtggtgatggcagtgtgggatgtcatttctttgaaccgtatgatcactggtttcattcgagatggtatcggcaatcgagctcttgtagtttacaagtggatggttgcttcaggctacagagagacccctcataccttctctgctattctcagtgcgtgcaacagctgcgagggactgcaactgcatggccgggtactggccttgggcctgtgctccaacccatttgtcaggtctgcattggtcaatctgtatatgcgtgttgagatgccttgtgctgccctcttgctgtacaatgaaatgccattgcagagtacagtcatgtccaacgtggttctgggtggcttttgcaacctgaagttggctgaggacctcctttgttccttgctagacatgagacgacgtggtttggagttgaatggtctttcttactgttacgcaatgaaagtatgctatcaagatgaagaatggctgcaacaaggcaggcagcttcatggagtagttctcaaggcagggtgggttccgtcaaatattttcctgtcaaactcgcttgtggatctttactcagcaatcggagacttggtggatgctaagaattcactggatggtatcccttctgaggatgtcatctcatggaattccattgtttctgtttgtgcaagcaaagggcgtatgaaggaagcaactgattacttgagacagatgctttggcatggcaagatgccctcggtccgctcctttgttgggctctttgcttcgtctggtcagactggagaccttggagtcggggttcagatgcatggtattgctctcaagcttggattctgctggagtcgtgtgcatgtgcaaactgcactcattaacatgtatggaaagtgccgctcttttgattgttccttggcaatcttcaatgaaatcccaagccttgcactggagtgctgtaattcaacaatcacatcatcaattcgctgcaaggtttttcactccacattggaggtcttgtattgtatgactgtagagggagttatgcctgataatgtgactctctctgcaacactgaaggccatatctctgtcagtttctccaagtttaatcagttgccagatgctgcattcttgggtcttcaagctgggctttgaaacagacatggctgtgtgctcctccttgatcagcgcttatgctcgagctggccatctgagcagttcccacttgatattcaaaagcttgcaggatccaaacgttgtttgctttacttcattgatatctgcatgtgctcgatatggagatggcgcaaaaggagtggagctgctcaataacatggtttccagagggctcaagcctgacgacgtcaccttcctgtgcgcaatcgctgggtgtgatcaggcaggactgatcgaagaaggcaggctagtgatcgagctcatgagagcaacccgcgagctgggtcctgacgagaggcacctcgcttgcatggttaaccttctcggccgagacggttttgtggaggaggccatgaaaatgatggagcactcgccgctacggcactacaccaaggcgtggagctcgcttgttcagagctgcaaggcacatggtgaaaatgcgctgggaaagagagcggcaaatatgctgatagatgtgggccgaaaggacgcagccaccaacttgcaggtatcgagatacttttatgagattggggacggcgaaaatgcctctaggattaaagccatggcaagtgggcaacaagtgaaggagagtggtcacagctcggttgagatcagtcacagaatctag

SEQ ID NO: 319 - DNA, 3096 bp, Brassica napus
  source 1..3096: mol_type = genomic DNA
ctcaaaatcatgaactttcgagttctcttgtcgtcatcctcccccaagttcgattctttctccttgctacgtcgtttgagtttctccacggacttgagtcatcggatcattaaacaagttccccccaaccacgatcagatatataacagtctcctcgaaatatgtttggaccagtgcaaattattcaaaacccgcaaggtgttcgacgaaatgcctcagagacttttacacgtctcgagaatcggaaaagctgtacattcccggagcttgacgctcggaatcgatacaaaagggagattaggaaacaccgtcgttgatttatacgccaagtgtaaagaaacagcttacgctgagaaggttttcgagtctcttgagaaggatgtaatggcttggaactcgatgctatcgatgtattccagcattgggctacctggaaaggtcttgaggagttttgtgtcgttgtttgagggtttggtttttccgaataagttcactttttcgattgttttatcaacatgtgccagggagagtactgtaacgtttggtaggcagattcattgctgtatggtgaagacgggttttgaaaggaactcgtattgtggaggggctttggttgatatgtatgctaagtgtgactgcataggtgatgctcggcgagttttcgatggggtagtggatcccaatacagtttgctggacgtgtttgttttctggctatgtcaaagctggtttgccagaggaagctgttatagtttttgagaagatgcgtggtgaaggacatcgtcctgaccatctagctttcgtgactgttataaatacttacattagtttagggaagctgaaggatgcgcgtgtgttgtttggagagatggcgagccctgatgtggtggcgtggaatgtaatgatctcagggcatgggaaacgagggtgtgaggaagtagctgttgagtattttctcaggatgaggaagtctggtgttagatccactcgttcgacgctggggagtgttttaagtgcaattgggattgtagcgaatcttgagttaggtttggtggttcatgcggaggctattaaacaagggcttgcgtgtaatatatatgttgggagttctttggttagcatgtactcgaagtgtgagagaatggaggatgctgcgaaagtgtttgagggtttggaggagagaaacgacgtcttgtggaatgctatgataagaggttatgcgcataacggagaagctcataaggttatggagctgtttatggatatgagaggctctggtcataacgttgatgatttcacctttacaagcctgttaagtacttgtgctgcttcgcatgatcttgacatggggagccagtttcattcggttatcatcaagaagaaattagcggataacttattcgtgggaaatgcattggtagatatgtatgctaaatgcggaggtgttgaagatgcgaggaaggtttttgagcgcatgtgggaacgtgataacgtatcgtggaacacgatgattggtggttatgtccaagatgagaacgagagtgaggctttcaacttgttcaagaggatgaattcttgcggtatggtgtctgatggatcgtgtttagctagcacactcaaggcgtgtgcgaatgtccgtggtctttatctaggaaaacaagctcactgcctctctgtcaagtttggcttagagacagatcttcatgctggcagctcgctgattgacatgtatgccaagtgtggggtcatcgaagactcacgtaaagttttctcctctatgcctgagtggagcgttgtgtcgatgaatgcgttaattgcaggctatgctcagaacaacttggaagaagctgtggttctctttcgagagatggtgaccagaggtgttaacccatctgaaatcacttttgccaccatagttgaagcttgtgataaaccagaaacgttgaccttaggaacacagttccatggtcaaataataaagagaggggtctcatatgaaggtgagtatctagggatctctcttttgggcttgtacatgaactcatgtagaatagtggaggcgtgtgttcttttctcagagttccaaacccctaagagcattgttctttggacggggatgatgtcagggcatagtcagaacggtttctatgaggaagctttgaagttctacaaagaaatgcgtcgtgatggtgctttacctgatcaggcaacatttgtcactgttcttcgagtgtgctctgtcctttcctctttaagagaaggtagagcgatccattctctcaccttccacttggctcatgacctcgacgagttaacctctaacacgctaatagacatgtatgctaaatgtggggacatgaaaagctcatcacaagttttcgatgaaatgaagcgtagaagcaacgttgtctcatggaactccatcatcaatggatatgctaaaaatggttacgctgaagatgcccttaggatgtttgattccatgagacaatctcgtatcacgccagatgaaatcacattcctaggtgttctcacagcttgtagccacgcagggaaagtgtcagaagggcggaagatttttgagatgatgattagtcaatatggtgttgaagcgcgtgtagatcatgtagcttgtatggttgatcttcttggaagatggggttatcttgaagaagctgataacttcataaaagcacaaaacctgaaaccagatgcgagactatggtcatcgctccttggtgcatgtagtatccatggagatgacattagaggggaaatggctgctgagaagctcattgaacttgaaccacaaaactcgtcagcttatgttcttctttcgaacatatatgcctcacagggacgttgggagaaggtcaacgctttgaggaaagacatgaaagacagaggagtcagtaaggtacctggatgtagttggattgatgtgggagagagaaaacacgtttttggtgcaggagacaaatctcattctgatatttgcaaaatagagacgtttcttgaagatatatatgatctggtgaaagatgatgcaatcgtcaatcatgatatcatggaacatgcttctcatgattgtatctaa

SEQ ID NO: 320 - DNA, 1779 bp, Beta vulgaris
  source 1..1779: mol_type = genomic DNA
atgtctcttcgagatgccgtttcttggaatttactaatttctgggtacaaacgttatagaattccggacaaagcgttagaattatatactgaaatggtatctcaaggtttcagagaaaacccatcaacgttttcctctgttatgagcatttgtagcaatggtggatttctttttgagggggttcaagtacattgcagagtgatttcacttgggttttgccgaaatatgtatattgggtgttccattgtggatctttatatgcaaatggggtatgttgatgatgggttgaaagctttggatgaaatgcctgaaagaaatgttgctgcttggaattcggtttttcgtggattttgtgtattgggtttgtgggatgagatcataagacagtttcctagagtgaaaggtgatggagttgaattgaatgaacttatggtttgttatatgcttcagggttgttgtaatgggaactttgttagtcagggacaacagttgcattgtcatgctttcaaggctggattggttgaatcaaatcgtttcgttgctaacgctttggtggatttttactctgcttgtggaactctgagtgatgctcagaaatcatttgaagttattcctcaagatgctgtgatctcatggaattcaattgtttctgcatatgctaataatgggatgttgtttgatgcacttgagtgttttgaggcaatgcaatattggagtatgaaaccatctgtccgttcacttgttgcgttaatgaattcatgcagcagaagggagaatctttcattgggaagacagttgcattgttttgtcctgaaacttggttttgatcgtggaagcatccatgttgtctctgctctgattgatatgtatgggaaatgctatgagatggggacttcgtttaatgtatatgaggagtgccattataaaactatggagtgttgcaatactcttttgacatctatgttacattgtacttatactgaagaggtggttgagttgtttagattcatggttgatgaggtaattgaatttaatgaattctccttgtccactacactgaaagcattatcaggatcttcctttgcgggcttagcaagctgccaattgattcattctcttgctattaaacatggatttgaatctcatatcgtagtctcatgttcactaattgatatatattcaaaatttggtcaggttgatgattcaaactgtgtttttgaaggtttactttcacacagtgttttctcctttacatcaattataaacgggtatgcccggaatggcttaggaagagaatgcctgaaattactcgaagttatgcttcagaagggtttaaaaccagatagagtgacattcttgtgtgtcttgacagggtgtaatcattcgggtttagtagaggaaggaagaaaagtttttgagtccatgaatacactttatgatattgaaccagatcagaggcattattcatgcatggttgatctcttaggtcgtgcagggttggtatatgaagctgaagagttgttgaagctatcatatgtaaaagataattctttcatgtggagctcactgctgagaagttgtaggatacacaagaatgacgttgttggacaaagagtagcgaaacgcttgatggagcttgaaccgggaaattctggagtgtatatgcaagtttcgaacttttatcttgaagttggaaattctgaaatgtccatgcattacaaagaaattgggaaggcaagacaattggttagggagatgggccgcagcttcatcgtctga

SEQ ID NO: 321 - DNA, 2007 bp, Glycine max; identical to SEQ ID NO: 134
  source 1..2007: mol_type = genomic DNA

SEQ ID NO: 322 - DNA, 1995 bp, Helianthus annuus; identical to SEQ ID NO: 135
  source 1..1995: mol_type = genomic DNA

SEQ ID NO: 323 - DNA, 1983 bp, Sorghum bicolor
  source 1..1983: mol_type = genomic DNA
atgcccgtccgccaccgcgcgtctcgttcggaggcccgcggcccgcggccctcagtccaacgctcgtgcacctccccgccgggccgcccgagcatatcccctccagagagccgcccgccggagccctccacccgagcacctcccctcaagagcgcatccctcgccggagccagacgcctcccccgccgagcgcatctctgcctacgagagcatccgtcgcccgaggttgtacgctgcaccccctccctcccctacgagagcatccgtcgccctcgcccgaggttgcaggctcagcctccaggcctctacggactacggtggagaaggagaatggaggatgctgccaaacgtgcgtgcaacagctgcgagggactgcaactgcatggccgggtactggccttgggcctgtgctccaacccatttgtcaggtctgcattggtcaatctgtatatgcgtgttgagatgccttgtgctgccctcttgctgtacaatgaaatgccattgcagagtacagtcatgtccaacgtggttctgggtggcttttgcaacctgaagttggctgaggacctcctttgttccttgctagacatgagacgacgtggtttggagttgaatggtctttcttactgttacgcaatgaaagtatgctatcaagatgaagaatggctgcaacaaggcaggcagcttcatggagtagttctcaaggcagggtgggttccgtcaaatattttcctgtcaaactcgcttgtggatctttactcagcaatcggagacttggtggatgctaagaattcactggatggtatcccttctgaggatgtcatctcatggaattccattgtttctgtttgtgcaagcaaagggcgtatgaaggaagcaactgattacttgagacagatgctttggcatggcaagatgccctcggtccgctcctttgttgggctctttgcttcgtctggtcagactggagaccttggagtcggggttcagatgcatggtattgctctcaagcttggattctgctggagtcgtgtgcatgtgcaaactgcactcattaacatgtatggaaagtgccgctcttttgattgttccttggcaatcttcaatgaaatcccaagccttgcactggagtgctgtaattcaacaatcacatcatcaattcgctgcaaggtttttcactccacattggaggtcttgtattgtatgactgtagagggagttatgcctgataatgtgactctctctgcaacactgaaggccatatctctgtcagtttctccaagtttaatcagttgccagatgctgcattcttgggtcttcaagctgggctttgaaacagacatggctgtgtgctcctccttgatcagcgcttatgctcgagctggccatctgagcagttcccacttgatattcaaaagcttgcaggatccaaacgttgtttgctttacttcattgatatctgcatgtgctcgatatggagatggcgcaaaaggagtggagctgctcaataacatggtttccagagggctcaagcctgacgacgtcaccttcctgtgcgcaatcgctgggtgtgatcaggcaggactgatcgaagaaggcaggctagtgatcgagctcatgagagcaacccgcgagctgggtcctgacgagaggcacctcgcttgcatggttaaccttctcggccgagacggttttgtggaggaggccatgaaaatgatggagcactcgccgctacggcactacaccaaggcgtggagctcgcttgttcagagctgcaaggcacatggtgaaaatgcgctgggaaagagagcggcaaatatgctgatagatgtgggccgaaaggacgcagccaccaacttgcaggtatcgagatacttttatgagattggggacggcgaaaatgcctctaggattaaagccatggcaagtgggcaacaagtgaaggagagtggtcacagctcggttgagatcagtcacagaatc

SEQ ID NO: 324 - DNA, 3087 bp, Brassica napus
  source 1..3087: mol_type = genomic DNA
atgaactttcgagttctcttgtcgtcatcctcccccaagttcgattctttctccttgctacgtcgtttgagtttctccacggacttgagtcatcggatcattaaacaagttccccccaaccacgatcagatatataacagtctcctcgaaatatgtttggaccagtgcaaattattcaaaacccgcaaggtgttcgacgaaatgcctcagagacttttacacgtctcgagaatcggaaaagctgtacattcccggagcttgacgctcggaatcgatacaaaagggagattaggaaacaccgtcgttgatttatacgccaagtgtaaagaaacagcttacgctgagaaggttttcgagtctcttgagaaggatgtaatggcttggaactcgatgctatcgatgtattccagcattgggctacctggaaaggtcttgaggagttttgtgtcgttgtttgagggtttggtttttccgaataagttcactttttcgattgttttatcaacatgtgccagggagagtactgtaacgtttggtaggcagattcattgctgtatggtgaagacgggttttgaaaggaactcgtattgtggaggggctttggttgatatgtatgctaagtgtgactgcataggtgatgctcggcgagttttcgatggggtagtggatcccaatacagtttgctggacgtgtttgttttctggctatgtcaaagctggtttgccagaggaagctgttatagtttttgagaagatgcgtggtgaaggacatcgtcctgaccatctagctttcgtgactgttataaatacttacattagtttagggaagctgaaggatgcgcgtgtgttgtttggagagatggcgagccctgatgtggtggcgtggaatgtaatgatctcagggcatgggaaacgagggtgtgaggaagtagctgttgagtattttctcaggatgaggaagtctggtgttagatccactcgttcgacgctggggagtgttttaagtgcaattgggattgtagcgaatcttgagttaggtttggtggttcatgcggaggctattaaacaagggcttgcgtgtaatatatatgttgggagttctttggttagcatgtactcgaagtgtgagagaatggaggatgctgcgaaagtgtttgagggtttggaggagagaaacgacgtcttgtggaatgctatgataagaggttatgcgcataacggagaagctcataaggttatggagctgtttatggatatgagaggctctggtcataacgttgatgatttcacctttacaagcctgttaagtacttgtgctgcttcgcatgatcttgacatggggagccagtttcattcggttatcatcaagaagaaattagcggataacttattcgtgggaaatgcattggtagatatgtatgctaaatgcggaggtgttgaagatgcgaggaaggtttttgagcgcatgtgggaacgtgataacgtatcgtggaacacgatgattggtggttatgtccaagatgagaacgagagtgaggctttcaacttgttcaagaggatgaattcttgcggtatggtgtctgatggatcgtgtttagctagcacactcaaggcgtgtgcgaatgtccgtggtctttatctaggaaaacaagctcactgcctctctgtcaagtttggcttagagacagatcttcatgctggcagctcgctgattgacatgtatgccaagtgtggggtcatcgaagactcacgtaaagttttctcctctatgcctgagtggagcgttgtgtcgatgaatgcgttaattgcaggctatgctcagaacaacttggaagaagctgtggttctctttcgagagatggtgaccagaggtgttaacccatctgaaatcacttttgccaccatagttgaagcttgtgataaaccagaaacgttgaccttaggaacacagttccatggtcaaataataaagagaggggtctcatatgaaggtgagtatctagggatctctcttttgggcttgtacatgaactcatgtagaatagtggaggcgtgtgttcttttctcagagttccaaacccctaagagcattgttctttggacggggatgatgtcagggcatagtcagaacggtttctatgaggaagctttgaagttctacaaagaaatgcgtcgtgatggtgctttacctgatcaggcaacatttgtcactgttcttcgagtgtgctctgtcctttcctctttaagagaaggtagagcgatccattctctcaccttccacttggctcatgacctcgacgagttaacctctaacacgctaatagacatgtatgctaaatgtggggacatgaaaagctcatcacaagttttcgatgaaatgaagcgtagaagcaacgttgtctcatggaactccatcatcaatggatatgctaaaaatggttacgctgaagatgcccttaggatgtttgattccatgagacaatctcgtatcacgccagatgaaatcacattcctaggtgttctcacagcttgtagccacgcagggaaagtgtcagaagggcggaagatttttgagatgatgattagtcaatatggtgttgaagcgcgtgtagatcatgtagcttgtatggttgatcttcttggaagatggggttatcttgaagaagctgataacttcataaaagcacaaaacctgaaaccagatgcgagactatggtcatcgctccttggtgcatgtagtatccatggagatgacattagaggggaaatggctgctgagaagctcattgaacttgaaccacaaaactcgtcagcttatgttcttctttcgaacatatatgcctcacagggacgttgggagaaggtcaacgctttgaggaaagacatgaaagacagaggagtcagtaaggtacctggatgtagttggattgatgtgggagagagaaaacacgtttttggtgcaggagacaaatctcattctgatatttgcaaaatagagacgtttcttgaagatatatatgatctggtgaaagatgatgcaatcgtcaatcatgatatcatggaacatgcttctcatgattgtatctaa

SEQ ID NO: 325 - DNA, 1779 bp, Beta vulgaris; identical to SEQ ID NO: 320
  source 1..1779: mol_type = genomic DNA

SEQ ID NO: 326 - protein, 668 aa, Glycine max; identical to SEQ ID NO: 158

SEQ ID NO: 327 - protein, 664 aa, Helianthus annuus; identical to SEQ ID NO: 159

SEQ ID NO: 328 - protein, 661 aa, Sorghum bicolor
MPVRHRASRSEARGPRPSVQRSCTSPPGRPSISPPESRPPEPSTRAPPLKSASLAGARRLPRRAHLCLREHPSPEVVRCTPSLPYESIRRPRPRLQAQPPGLYGLRWRRRMEDAAKRACNSCEGLQLHGRVLALGLCSNPFVRSALVNLYMRVEMPCAALLLYNEMPLQSTVMSNVVLGGFCNLKLAEDLLCSLLDMRRRGLELNGLSYCYAMKVCYQDEEWLQQGRQLHGVVLKAGWVPSNIFLSNSLVDLYSAIGDLVDAKNSLDGIPSEDVISWNSIVSVCASKGRMKEATDYLRQMLWHGKMPSVRSFVGLFASSGQTGDLGVGVQMHGIALKLGFCWSRVHVQTALINMYGKCRSFDCSLAIFNEIPSLALECCNSTITSSIRCKVFHSTLEVLYCMTVEGVMPDNVTLSATLKAISLSVSPSLISCQMLHSWVFKLGFETDMAVCSSLISAYARAGHLSSSHLIFKSLQDPNVVCFTSLISACARYGDGAKGVELLNNMVSRGLKPDDVTFLCAIAGCDQAGLIEEGRLVIELMRATRELGPDERHLACMVNLLGRDGFVEEAMKMMEHSPLRHYTKAWSSLVQSCKAHGENALGKRAANMLIDVGRKDAATNLQVSRYFYEIGDGENASRIKAMASGQQVKESGHSSVEISHRI

SEQ ID NO: 329 - protein, 1028 aa, Brassica napus
MNFRVLLSSSSPKFDSFSLLRRLSFSTDLSHRIIKQVPPNHDQIYNSLLEICLDQCKLFKTRKVFDEMPQRLLHVSRIGKAVHSRSLTLGIDTKGRLGNTVVDLYAKCKETAYAEKVFESLEKDVMAWNSMLSMYSSIGLPGKVLRSFVSLFEGLVFPNKFTFSIVLSTCARESTVTFGRQIHCCMVKTGFERNSYCGGALVDMYAKCDCIGDARRVFDGVVDPNTVCWTCLFSGYVKAGLPEEAVIVFEKMRGEGHRPDHLAFVTVINTYISLGKLKDARVLFGEMASPDVVAWNVMISGHGKRGCEEVAVEYFLRMRKSGVRSTRSTLGSVLSAIGIVANLELGLVVHAEAIKQGLACNIYVGSSLVSMYSKCERMEDAAKVFEGLEERNDVLWNAMIRGYAHNGEAHKVMELFMDMRGSGHNVDDFTFTSLLSTCAASHDLDMGSQFHSVIIKKKLADNLFVGNALVDMYAKCGGVEDARKVFERMWERDNVSWNTMIGGYVQDENESEAFNLFKRMNSCGMVSDGSCLASTLKACANVRGLYLGKQAHCLSVKFGLETDLHAGSSLIDMYAKCGVIEDSRKVFSSMPEWSVVSMNALIAGYAQNNLEEAVVLFREMVTRGVNPSEITFATIVEACDKPETLTLGTQFHGQIIKRGVSYEGEYLGISLLGLYMNSCRIVEACVLFSEFQTPKSIVLWTGMMSGHSQNGFYEEALKFYKEMRRDGALPDQATFVTVLRVCSVLSSLREGRAIHSLTFHLAHDLDELTSNTLIDMYAKCGDMKSSSQVFDEMKRRSNVVSWNSIINGYAKNGYAEDALRMFDSMRQSRITPDEITFLGVLTACSHAGKVSEGRKIFEMMISQYGVEARVDHVACMVDLLGRWGYLEEADNFIKAQNLKPDARLWSSLLGACSIHGDDIRGEMAAEKLIELEPQNSSAYVLLSNIYASQGRWEKVNALRKDMKDRGVSKVPGCSWIDVGERKHVFGAGDKSHSDICKIETFLEDIYDLVKDDAIVNHDIMEHASHDCI

SEQ ID NO: 330 - protein, 592 aa, Beta vulgaris
MSLRDAVSWNLLISGYKRYRIPDKALELYTEMVSQGFRENPSTFSSVMSICSNGGFLFEGVQVHCRVISLGFCRNMYIGCSIVDLYMQMGYVDDGLKALDEMPERNVAAWNSVFRGFCVLGLWDEIIRQFPRVKGDGVELNELMVCYMLQGCCNGNFVSQGQQLHCHAFKAGLVESNRFVANALVDFYSACGTLSDAQKSFEVIPQDAVISWNSIVSAYANNGMLFDALECFEAMQYWSMKPSVRSLVALMNSCSRRENLSLGRQLHCFVLKLGFDRGSIHVVSALIDMYGKCYEMGTSFNVYEECHYKTMECCNTLLTSMLHCTYTEEVVELFRFMVDEVIEFNEFSLSTTLKALSGSSFAGLASCQLIHSLAIKHGFESHIVVSCSLIDIYSKFGQVDDSNCVFEGLLSHSVFSFTSIINGYARNGLGRECLKLLEVMLQKGLKPDRVTFLCVLTGCNHSGLVEEGRKVFESMNTLYDIEPDQRHYSCMVDLLGRAGLVYEAEELLKLSYVKDNSFMWSSLLRSCRIHKNDVVGQRVAKRLMELEPGNSGVYMQVSNFYLEVGNSEMSMHYKEIGKARQLVREMGRSFIV

SEQ ID NO: 331 - DNA, 2481 bp, Beta vulgaris
  source 1..2481: mol_type = genomic DNA
atgaatgccatatttactaaatttttccggatagaattgttctggcgtgatttacgatgtgatggaggaagaattgatacaagggttgaaactgttgttaataatcaatctgaactgggaactggtcatatacaacaagaaaataaacgcaggagattagtacaaccatctttgtgttttaattcagagtgtgtagataggataattagctggttagataatgatgaagttgacactattggtgtttatgggatgtgtggtgttggaaagaccactctggcaacgcagctcgaaactcggcttctaaaccatgatatccgttttagtgctagtcatgatgttgctggggtttctgtgggggtgaattgcagtgtatataaattgcagcaggatatcgcgggtgcttttgggatcgatcttcaaggcgatgaggataagattagaagagcctctatgatagaggcgtttttgtctcgtcgtgataagtgtgtactcattcttgatgatttgtggggtgattttcgtcgaaaagatgtaggcattcctaaggagtgcaagctagttttgatttctcagtcgttggatgtttgtcgtgtccttggttgtgaaaaggtgctcaaggttgagcctctttcggaaggaaagacttggaagttgtttaaccatagtatagggggtggtgttttgaataatgaagatgtgtgtcgtattcggaagcttgtgtatgataagtgtgctggtctccctcttgctatcgttgaattagccaagagattgagaaagatggttgatgataatggttttagttggagggaagtccttgagggtacgaatcccttttcttcgagatcaatgcacttggaagatacattcagtcacttgaagttgtcttatgaaaggctgagcgacatcaaactccagcagtgtttcttgtattctgcgatataccccaaaggccatgctattagtagagaagagctaattcgtgtttggattggagagaagttgatagatgatatatcatcattgctagcacagtatgacaagggccactcaatattgaataagcttatcaactcttgtttattggaagcatgtgaagattataaaggctgtataaagatccatgaagttgtgaggcatatggctctctcaatagctggagatagttttatgatagaagctggcgtaccttcaaaatttgagttccgggaaaatgttcgtgtagtttccttgatcaattctttaatttcaccgatcccatcaggtgcttcctcaaagtatcatactctttctaccttacttttgcaacacaacccccttgaactgattccagaatcattattcttgcaaatgcgtgcccttagagttctgaatctgtctgatactcgcctcattagacttcctagttccattggtgccttggaggagcttcgagtcttagatcttagcttttgtcagaacttgaagcaagtggcagccttatcaaagcttctcaagttacagtttctaaatctctctcagacgacaatcgaaaaagttccttgctctcttgaaaagttaaaaagactcacagagctcaacctatcctctattcctgaaccaacaaaaatccctagtgtagtattgcttgccctatgtagactcaagaaattaacatgccatgttataggcactattcatgagctgcagagaatgaactcgctagaaattcttgatgccaggttttttagcctctgtgacttgagtgcttatgtaaggtctcagcattggtgcatactagagagctacagtttacagcttggttgcgaggtgcaagctgagcaaccgtacatcagaagagtatcactgcagggtttttccttgactggtcaagaacagtacattgtgcttccaagtaacatccaggaattatatgtcgataattgcagaggcttccgtaggctatctgatgtcatgtatcctgttgcatatcaacataaaagttgccagaactatgaagtttttttaagcctcgaaatatgtgtgatcagtaggtgccctgacgttgagacattgtttgcagcgaattgggtagagaatctccaatcccttgagttattgcaagttgaagattgtggacaactgaaggaagtaataacagaagaatttgtagaacggggtgtctatcctgaaggaatttctgctcctatcaatctcctccagattaggcagctaattttcactcggttgcctcagatggaaagcatctataagggtcaattagtttgtgcttcgcttctgtcatgtacatttctggactgtccgaaactgacgcgccttcccttctcctgcatgggtaatggagaagaaacatttccctggcgtctggaatggattgaaggagaaaagaagtggtgggagatgttagaatgggaccaaccgggatctgaggctttgttcaaacctctgtttagatgcaagtctttggatgatcattga

SEQ ID NO: 332 - DNA, 2481 bp, Beta vulgaris; identical to SEQ ID NO: 331
  source 1..2481: mol_type = genomic DNA

SEQ ID NO: 333 - protein, 826 aa, Beta vulgaris
MNAIFTKFFRIELFWRDLRCDGGRIDTRVETVVNNQSELGTGHIQQENKRRRLVQPSLCFNSECVDRIISWLDNDEVDTIGVYGMCGVGKTTLATQLETRLLNHDIRFSASHDVAGVSVGVNCSVYKLQQDIAGAFGIDLQGDEDKIRRASMIEAFLSRRDKCVLILDDLWGDFRRKDVGIPKECKLVLISQSLDVCRVLGCEKVLKVEPLSEGKTWKLFNHSIGGGVLNNEDVCRIRKLVYDKCAGLPLAIVELAKRLRKMVDDNGFSWREVLEGTNPFSSRSMHLEDTFSHLKLSYERLSDIKLQQCFLYSAIYPKGHAISREELIRVWIGEKLIDDISSLLAQYDKGHSILNKLINSCLLEACEDYKGCIKIHEVVRHMALSIAGDSFMIEAGVPSKFEFRENVRVVSLINSLISPIPSGASSKYHTLSTLLLQHNPLELIPESLFLQMRALRVLNLSDTRLIRLPSSIGALEELRVLDLSFCQNLKQVAALSKLLKLQFLNLSQTTIEKVPCSLEKLKRLTELNLSSIPEPTKIPSVVLLALCRLKKLTCHVIGTIHELQRMNSLEILDARFFSLCDLSAYVRSQHWCILESYSLQLGCEVQAEQPYIRRVSLQGFSLTGQEQYIVLPSNIQELYVDNCRGFRRLSDVMYPVAYQHKSCQNYEVFLSLEICVISRCPDVETLFAANWVENLQSLELLQVEDCGQLKEVITEEFVERGVYPEGISAPINLLQIRQLIFTRLPQMESIYKGQLVCASLLSCTFLDCPKLTRLPFSCMGNGEETFPWRLEWIEGEKKWWEMLEWDQPGSEALFKPLFRCKSLDDH

SEQ ID NO: 334 - DNA, 12 bp, synthetic construct
  source 1..12: mol_type = other DNA
  misc_feature 1..12: note = SSR trinucleotide repeat
atgatgatgatg

SEQ ID NO: 335 - DNA, 10 bp, synthetic construct
  misc_feature 1..10: note = SSR dinucleotide repeat
  source 1..10: mol_type = other DNA
gagagagaga

SEQ ID NO: 336 - DNA, 202 bp, Spinacia oleracea
  source 1..202: mol_type = genomic DNA
aaggaactcttgaaagatacaatggtgaagaagcagagcttaataaagactaaaatatgattaagttagtgaaagaaaaggattcaatggccctgcatgtagcaaacaaatagtgtcacaaaagtgaaaaagatgtacaccgcataatccacaactaatgatgcaagctttagttgaggttcaaggctaaaacaatcaccat

SEQ ID NO: 337 - DNA, 202 bp, Spinacia oleracea
  source 1..202: mol_type = genomic DNA
tgtaaggtctcagcattggtgcatattagagagctatcatctacaggttggttttgaggtgagatctgagcaaccatacaacagaagagtatcactctccgagatgttctttgactggtcaagagggagactacgttgtgcttccaagtaacatccaggagttgtatgttgataattgcagagactttcgttgcctatctga

SEQ ID NO: 338 - DNA, 202 bp, Spinacia oleracea
  source 1..202: mol_type = genomic DNA
tttttggtccctacaagattattttctgccaaactcgactctacccattcaatacttcgtatgaaaagaggcttgaacatagtctctgtcatcttcatcgtccaaagcaaccaccgcaccaatgacatgtttctccacgaaagtaatattctcaattgattcaaggtgctgactgcggagatccagagccagcatacagaag

SEQ ID NO: 339 - DNA, 7280 bp, Spinacia oleracea
  source 1..7280: mol_type = genomic DNA
tatatataacaatgacaatacttatataaccgatgacaatatataacaagttagcaacactatttaagtgtgggccatcttttcaactttttttttttttttaagggtgggtatggattttttttgtcgctggtggacagcgatgtagccaacctctaatacggagtatgatgaaagatataagtttgagcaaaaaaagtcttacacgcatataataaatttattgcatgtcaggaaaactacttcctaaatttttgtaacttttaactaattttttgtaacttttatattataaaaaaaattgatagataaacatgtgttaaatgattaattttttacattattaacaaatttgaaaaaatattttttattaaaatgaaaatttttatcactaaaaaaaaaatactggagtagatgtcatttacaaagagtaacttttaagcattttaaaacaacttttactccaacttataatattaagtctgaaatgggttgtataattattaacatagattccataattttactctttttaccaaaaattgcacttaagttcattttcatttcaatagttttgttaccggctatcttacggatgtttgtgtgacaaagactttattctcatcacttaatttggtctgatatgataagatctgatctgaaagatgtatatgactgctttttgattttttgtccttacggatgtttgtaaaaccaagactttgttctcctcattttttgtctaatatgatctgatctgaaagttatataagtgctttttttatttttgtcttttctaatttgatataattttttttctgatctgatctaatttttctgaacaatttcgcattcatacagacgtactccctccgtatttatttaaaggatgcacttgacttttccggccgtatttatttaagagatacacttgccatttttagtaacttatcaaccccaccatctaattaaataatactccctccattcctaaataagtgtccagttcccataaatagagttcccttataagtgtccagttttcatttttggacatacatctttctcacttttctatacacttttctcactttttcacacacttttcccatttttctataaatcattattactttttattacacattctacactcttcatacttttcaatcaccacatccacttttatttatactttatcaataaacaattatctactttttcctttcccaaaaaaaaaatattctcaatcattacctcttacacacaattcagttttattaatcacgcgtaaatgtccaaagtggacacttatttaggaacgaagggagtacatctaatttaccctatgacctaccatcctattaaacaaataatttcataaacccaccccacctcccaccccaccaaaatgacatggtcccacttgtttacttattaaaatatcacccaatcccacttattttattattatatttcatttaatttttttcttaatacccgtgctcgactaagtgtatccgttaaataaatacaaagagagtagttaacaggttcacattttttaaagtctagtccgttgggcgatagtagactttttttgggtttaaattagtacccagttttcttaaatatgaggagcctagacattttaaggagttaacaaaaatggagagcacttttcttcactgatacagagtagctcatattcgtcagttatggcgcatcaggttcgaatttttcttcctaattatttgtgcaggctgtagatatcatcttattctttcaaattgcttaatttaatttaatttaattattaaggccatgttcttgagattactataatttcttatgagttactgttcttaatttctaaatttcttcattgagataattaaaaacagcaaaattaagcaagaatcataacaatacagttactgagtacatattaatactgtaataaataaatagtaattgttttttttggtttttgtttttgtttccgtagatccaaattccaatcaagatgatttcgattattgctaatttgtttgggataggaaggtatcaccgcggtgtaccgtgtgatggaggaactcttgataatcatcaatctgaattgagtagtgttcttatacaacctcaaaataaacgaagaaaagttgaggaatttctttggtttaatactgagtatgttgatagaattattggttggttaaaggatagtgagattgatactattggtgtttatgggatgggtggagttgggaagaccaccctcgcaactcagctccaaactcggctattgaatcatgttgttgcctgggtttctgtgggggtggattttactgtatataagttgcaacaagatattgccgggtcattcgggcttgatcttcaaggggatagggatgcgattagaagagcagctatgattagtgagtttttgtgtcgtaatcataactgtgtactcttccttgatgatttatggggtgatttccgtagagaagatgttggaattcccagaaaatgtaagttgattgtcatttctcggttgctggatgtgtgtcgtaagcttcgttgcaagaaggtagttaaggttgagccacttcaagaggaagagagttggcagttgtttaaccgtagcatagggtatggtgttttgaattctgtagatgtgtgtcgtattaggaagctcgtgtatgataagtgtgtaggtctccctcttgctatcactagtttagcaaccagtttgaggaagatggttgatgatgataatccttctagttggagggaagttctcgagaattttgatcttctatctgcgaaacaacctcacttggaagatacatttagtcagttgaggttgtcatacgaaaggttgaacaacaaaccccagcgttgtttcctgtattctgcattataccccaaaggctatgccatcaggaaagaagagctgattcgtgtttggattggaatggagctgatagatgacgtgccatcattgcaggcacggtataacatgggccattctatattgaataaacttgttgactcttgtttgctggaaacatatgataatgataacataatcaagatcaatgatcttgttaggcatatggctctttccattgccggagatagttacatggtagaagctggaatacctacaaattttgagttccgggaaaatctccgtgttgtttccttggtgaattcttcaataccatcgatcccatcaggtgcttcccttattaagtgtcattgtctctctactttacttctgcaacacaactcccttgagtttatcccagagtcttttttcttgcacatgcgtggccttcgagttttgaatctatctgatacgaacttaattagactgccgagttccattgatgcccttgaagagcttcgagtcttggatcttagtttctgtcaaaacttgaagcaagtgacatcattgtcaaacctttgtgagctgcagaatgtgaattcattagaagttcttgatgccagattcttaaacctttgtgacctgagcagttatgtaaggtctcagcattggtgcatattagagagctatcatctacaggttggttttgaggtgagatctgagcaaccatacaacagaagagtatcactctccagatgttctttgactggtcaagagggagactacgttgtgcttccaagtaacatccaggagttgtatgttgataattgcagagactttcgttgcctatctgatgtcttgcttcctgttgcatatcgtcatagaaactgccagaacggtgcaagtgtagacagttgcaacggagagcaagctgaagtttttgcagggcttgaaatgtgcattatcagtagatgccaggatgttaagacactatttgcaccaagttgggtggaggagaatctccaatcccttgaattattacaagttgaaaattgtagacaagtgaaggagataattgcagaggaagttgtggaatgtggtcattctgaaggaaaggatgctgtcattagcctaccccaacttacgcggctagttctgactctgttgcctcaagtgcatagtgtctataaaggtctgctagtttgttcttcacttctgtggtgtacttttatggactgtccaaaactgaagcgccttccgttctccaacatggatcgtctagaatggattgaaggtcaagaaaaatggtgggacttgttggaatgggatgaaccggaatccaaagcttcgctcagacccttgtttagatgcaagtctgtggatggtgatcgataactgacttgaccatcttgctgtgctggagcttgctagctagctgtttcagagtccgagataaaacttgtgttaaatggttcgcctgcttcccttctcttcccccaaccccaaccccaaccccaaccccaacctcaccctcacccttgcatttcttttttcaaatatacttagaaaaataaagaacaggtagaagcccatggttggcttcccaaatgtcaatccttcctatttcctaagatcaattgtagagatggataacatcatcaaatatcgtattaatcttgtattaatcttgataacggattcatatatgtttttatataataaagaatgattataattgaggcgaaaatagaaatttacgctgtacgtagtactacattgcaacccaaaaattcacgccacaaattttcgttactatttacattattaattcagtttaatgtcataaaggatattattgcatactctgtataagcttcaatcattgtttattaaaccacatattacttcatttgtgtttactatttatatggacaaagtttttaaattttgaccatatatgatagttagataatagaaaaggttattatcttgttggatcaacattggatccgtttcaataaataaaaatttcaactagttcgtatcacttttttctatcagggccaacactcgtagcgggaaaaataatctagcgtgtttggaggacttttggaaagatatggattggaatgaagttcattttatttcaatttcaatttcaatgtttggttaggcattttagatatatatggagtacttgtgaagaaatatgacgaggaacacgtacggttgagttatggttaagttcctgcccacatatttgatatttctggttgagttcctgttattctttacactgcgataaagccctcacatgtgacataaagccactaccttggcagcctcattttgtctgctagtcagttttgagagtaatgcaccacagttgagaaatgaaccgagtgattttgaatgttccttgccttggtggttattgttatataagctcgtaagtttgttatcaggggcacggtaatacggtatgatgaaagaagacattccatatgttatcttttccgcaacaatataaacagcattctaaattcgaatggtgcaagaatttattacttgactgataaaatccagcatgatctcggtagatcagcaacttacaacgtaacttgaacaaatacgaagtaaactttgaataaataaatgatgcttgctagcttcaattccatggcaaatcgcgattagttgcttactggtgagctccgtctttcagcacagaaatgaacgtcaaccagacctgttataccagcagttatcttttgtccgggtttcacaggcccgataccttctggggtgcctgcacaagacaaaaaacacatcagagtctgggctatcaagtttacacacacagaaacagcaaagtctaacaagtagtctgtactgtacctgttaggatgacatctccttccataagtgtcatgaaggaactgatgtggctaatcaggaatgggattttgaatatcatgtcttttgtcgatcccttctgcttcgattctccatcaacctttttgtcatataattaaacttgtttacatttgtattaatacaatcacaaacaattacatagaatgtatttacagagttgaactcacatccaaccacagctccaagttatgaggatcaggcactgcagatactggaatctgcagaaaattgacaaaccagggatcggataaataatccagccatatactgtactggactcctaattatttgtcgaattcgacacaactacatgaattatacaaatcatatcataccatttcactgataggggtaaacgtgtcgagtcctttagctagtagccatggaagacctgttgcctaacagaaggaaaggagaaattgtgaaacagaatgtcaggggagtatctgaagtttattacattatagttttataaatggcagaaactgaatgtcaatacaagtaaatttccactgaatgtacaagtcaatgttaagaagtatatgaacatatagtcaagataatcaccttaattgtggcttggagttcctttgctgtcatatcaagtcctaaagcatagcctgaaaactcaaaaacaattttttaagttgctaattatactaaactactgaagttgtaacacacagtacttactacaagtagttcgtgattatggaataagggtgaacattattctcatccaccggaccggcccggcccggccctgattactcaatcgtagtaagagtggacattacagtgtaggaaagatgtcaacttttccgtgcattctatagattaattctcaatttctcattgccatgaaagaaactcataaagagtgacttctaactaattgttgtccgtccttagggaggatttctaaacctcaagtgacttgtgtccatatgaatacaagtgagtaccaatacagaaaatttagtaccaatacaaaattttagtaccattaacacaaaattgcttagaaatatcaatacaagtcattttgtgttattggtactaaaatatgatatattggtactaaattttctgtattggtactcgcttgtgtttatacacaagtcacttgaggcctagacttcctcgtcctcaggccctcctcccatactctaacatgtagtcacgtgactcacgtgtttaagcaatcatgaagtcatgaggtggtgaggatgagtttggaatctaatatatatatatatatatatataaaggggagttttttggagagattttagagcgtccacgtaggattgtccagtcacataattaaatattaattttatttttaaatgataaataatgagataaaattaaatataatagtagtcaaatactgataaaagacaataaggaataatattatcagtaaaagtataggataattattatc

SEQ ID NO: 340 - DNA, 2481 bp, Spinacia oleracea; identical to SEQ ID NO: 173
  source 1..2481: mol_type = genomic DNA

SEQ ID NO: 341 - protein, 826 aa, Spinacia oleracea; identical to SEQ ID NO: 174

SEQ ID NO: 342 - protein, 763 aa, Spinacia oleracea
MAHQIQIPIKMISIIANLFGIGRYHRGVPCDGGTLDNHQSELSSVLIQPQNKRRKVEEFLWFNTEYVDRIIGWLKDSEIDTIGVYGMGGVGKTTLATQLQTRLLNHVVAWVSVGVDFTVYKLQQDIAGSFGLDLQGDRDAIRRAAMISEFLCRNHNCVLFLDDLWGDFRREDVGIPRKCKLIVISRLLDVCRKLRCKKVVKVEPLQEEESWQLFNRSIGYGVLNSVDVCRIRKLVYDKCVGLPLAITSLATSLRKMVDDDNPSSWREVLENFDLLSAKQPHLEDTFSQLRLSYERLNNKLQRCFLYSALFPKGYAIRKEELIRVWIGMELIDDVPSLQARYNMGHSILNKLVDSCLLETYDNDNIIKINDLVRHMALSIAGDSYMVEAGIPTNFEFRENLRVVSLVNSSIPSIPSGASLIKCHCLSTLLLQHNSLEFIPESFFLHMRGLRVLNLSDTNLIRLPSSIDALEELRVLDLSFCQNLKQVTSLSNLCELQNVNSLEVLDARFLNLCDLSSYVRSQHWCILESYHLQVGFEVRSEQPYNRRVSLSRCSLTGQEGDYVVLPSNIQELYVDNCRDFRCLSDVLLPVAYRHRNCQNGASVDSCNGEQAEVFAGLEMCIISRCQDVKTLFAPSWVEENLQSLELLQVENCRQVKEIIAEEVVECGHSEGKDAVISLPQLTRLVLTLLPQVHSVYKGLLVCSSLLWCTFMDCPKLKRLPFSNMDRLEWIEGQEKWWDLLEWDEPESKASLRPLFRCKSVDGDR
